(19) United States
(12) Patent Application Publication
(10) Pub. No.: US 2025/0085282 A1
(43) Pub. Date: Mar. 13, 2025

(54) METHOD FOR DETECTING ANTI-SARS-COV-2 SPIKE (S) IMMUNOGLOBULINS

(71) Applicant: NOVAVAX, INC., Gaithersburg, MD (US)

(72) Inventors: Joyce S. PLESTED, Gaithersburg, MD (US); Raj KALKERI, Gaithersburg, MD (US)

(21) Appl. No.: 18/882,452

(22) Filed: Sep. 11, 2024

Related U.S. Application Data
(60) Provisional application No. 63/581,754, filed on Sep. 11, 2023.

(51) Int. Cl. G01N 33/569

(52) U.S. Cl. CPC G01N 33/56983; G01N 2333/165; G01N 2469/20

(57) ABSTRACT

Disclosed are methods for detecting if a biological sample (e.g., serum, blood, plasma) contains antibodies against SARS-CoV-2 S glycoproteins comprising: (i) providing a surface coated with a SARS-CoV-2 S glycoprotein; (ii) exposing the surface to the biological sample; (iii) exposing the surface to a secondary antibody; and (iv) detecting the secondary antibody that is bound to the surface; wherein the biological sample contains antibodies that bind to the SARS-CoV-2 S glycoprotein if secondary antibody is detected.

### CROSS REFERENCE TO RELATED APPLICATIONS

[0001] This application claims priority to U.S. Provisional Application No. 63/581,754 filed on Sep. 11, 2023. The aforementioned application is incorporated by reference herein in its entirety.

### REFERENCE TO AN ELECTRONIC SEQUENCE LISTING

[0002] This application contains a Sequence Listing which has been submitted electronically in XML format and is hereby incorporated by reference in its entirety. Said XML copy, created on Sep. 11, 2024 is named 1450_105US1_Sequence_Listing_09_11_2024 and is 814,987 bytes in size.

### FIELD

[0003] The present disclosure is generally related to methods for identifying if a biological sample (e.g., serum, blood, plasma) contains antibodies against SARS-CoV-2 S glycoproteins.

### BACKGROUND OF THE INVENTION

[0004] The coronavirus disease 2019 (COVID-19) pandemic is caused by severe acute respiratory syndrome coronavirus 2 (SARS-CoV-2). The emergence of variants (such as Alpha, Beta, Gamma, Delta, and multiple Omicron subvariants) has led to ongoing transmission of the virus. Some SARS-CoV-2 variants (such as Omicron) have immune evasion properties, thus reducing the effectiveness of COVID-19 vaccines. There is a need for additional correlates of protection (CoPs) for COVID vaccine efficacy to help track immune evasion and understand the needs of the vaccine development landscape (e.g., development of new vaccines based on variant S protein sequences). Validated CoPs help to extrapolate vaccine efficacy/immunogenicity results to populations or formulations/schedules not represented in clinical trials. Of particular interest are CoPs for durability and level of vaccine-driven protection against ancestral and variant strains.

[0005] Biomarkers of immunogenicity, which may eventually be proven to be correlates of protection, are critical for assessment of vaccines. In particular, the amount of anti-SARS-CoV-2 S (spike) antibodies in a biological sample determines the effectiveness of the humoral response induced by the vaccine. Current assays measure total anti-SARS-CoV-2 S antibodies. Not all of these antibodies are desirable. Improved assays to evaluate anti-SARS-CoV-2 S antibodies induced by vaccines is necessary.

[0006] There are four unique subclasses of human IgG, numbered in order of relative abundance, include IgG1, IgG2, IgG3, and IgG4. IgG1 and IgG3 are the major contributors to rapid IgG responses to protein and membrane antigens, and are active in viral neutralization, although some differences in IgG subclass responses have been identified in the context of SARS-CoV-2 infection and vaccination. Indeed, IgG3 response to SARS-CoV-2 infection has been highlighted by an analysis of convalescent plasma, showing that while IgG3 accounted for 12% of total anti-Spike (anti-S) protein IgG, it contributed to approximately 80% of total live SARS-CoV-2 neutralizing activity. In addition, IgG1, and especially IgG3, bind FcγRIIa, FcγRIIIa, and C1q, thereby supporting antibody-dependent cellular phagocytosis (ADCP), antibody-dependent cytotoxicity (ADCC), and antibody-dependent complement deposition (ADCD).

[0007] Repeated mRNA SARS-CoV-2 vaccination has been associated with significant increases in the proportion of immunoglobulin G4 (IgG4) in Spike-specific responses and reductions in Fc-mediated ADCP and ADCD that may limit control of viral infection. After repeated mRNA SARS-CoV-2 vaccination, IgG3 was observed to reach peak levels after a second dose, and steadily declined thereafter to significantly lower levels after the third and fourth dose vaccinations, while IgG4 increased. ₅IgG4 is generally in low abundance (0-5% of total IgG) but may slowly increase over time due to repeated or excessive exposure to some antigens. Although repeated antigen exposure seems necessary, it is insufficient to induce IgG4, as prolonged activation of IL-10-expressing CD4⁺ T-cells or expression of other anti-inflammatory cytokines is also required. Increased concentrations of IgG4 have been associated with immunosuppression and poor clinical outcomes of COVID-19, and while generally regarded as anti-inflammatory, may contribute to some autoimmune disorders and inflammatory IgG4-related diseases.

### SUMMARY OF THE INVENTION

[0008] Provided herein are methods for determining if a biological sample contains antibodies that bind to the SARS-CoV-2 Spike (S) glycoprotein, comprising: (i) providing a surface coated with a SARS-CoV-2 S glycoprotein; (ii) exposing the surface to the biological sample; (iii) exposing the surface to a secondary antibody; and (iv) detecting the secondary antibody that is bound to the surface; wherein the biological sample contains antibodies that bind to the SARS-CoV-2 S glycoprotein if secondary antibody is detected. In embodiments, the SARS-CoV-2 S glycoprotein has at least 80%, at least 81%, at least 82%, at least 83%, at least 84%, at least 85%, at least 86%, at least 87%, at least 88%, at least 89%, at least 90%, at least 91%, at least 92%, at least 93%, at least 94%, at least 95%, at least 96%, at least 97%, at least 98%, at least 99%, or 100% identity to a polypeptide of any one of SEQ ID NOS: 2, 4, 38, 41, 44, 48, 51, 54, 58, 61, 63, 65, 67, 73, 75, 78, 79, 82, 83, 85, 106, 108, 89, and 110, 112-115, 132, 133, 114, 138, 141, 144, 147, 151, 153, 156, 158, 174, 175, 176, 181-184, 186, 188, 190, 195, 217-228, 233-236, 243, 255-264, 273-280, 283, 284, 287, 288, 291, 292, and 294, 296, 298, 300, 302, 304, 306, 308, 310, 312, 314, 316, 318, 320, 322, 324, 236, 328, 329, 330, 331, 332 and 333. In embodiments, the SARS-CoV-2 S glycoprotein has an inactive furin cleavage site. In embodiments, the inactive furin cleavage site comprises the amino acid sequence of QQAQ (SEQ ID NO: 7). In embodiments, amino acids 973 and 974 of the SARS-CoV-2 S glycoprotein are proline, as compared to a wild-type SARS-CoV-2 S glycoprotein having the amino acid sequence of SEQ ID NO: 2. In embodiments, the antibodies that bind to the SARS-CoV-2 S glycoprotein are IgG. In embodiments, the antibodies that bind to the SARS-CoV-2 S glycoprotein are IgG1. In embodiments, the antibodies that bind to the SARS-CoV-2 S glycoprotein are IgG2. In embodiments, the antibodies that bind to the SARS-CoV-2 S glycoprotein are IgG3. In embodiments, the antibodies that bind to the SARS-CoV-2 S glycoprotein are IgG4. In embodiments, the secondary antibody is selected from the group consisting of an anti-human IgG antibody, an anti-human IgG1 antibody, an anti-human IgG2 antibody, an anti-human IgG3 antibody, and an anti-human IgG4 antibody. In embodiments, the SARS-CoV-2 S glycoprotein is from a SARS-CoV-2 virus or a variant of SARS-CoV-2. In embodiments, the variant of SARS-CoV-2 is a B.1.1.7 SARS-CoV-2 strain; a B.1.351 SARS-CoV-2 strain; a P.1 SARS-CoV-2 strain; a Cal.20C SARS-CoV-2 strain; a B.1.617.2 SARS-CoV-2 strain; a B.1.525 SARS-CoV-2 strain; a B.1.526 SARS-CoV-2 strain; a B.1.617.1 SARS-CoV-2 strain; a C.37 SARS-CoV-2 strain; a B.1.621 SARS-CoV-2 strain; or a B.1.1.529 SARS-CoV-2 strain. In embodiments, the SARS-CoV-2 S glycoprotein has at least 80%, at least 81%, at least 82%, at least 83%, at least 84%, at least 85%, at least 86%, at least 87%, at least 88%, at least 89%, at least 90%, at least 91%, at least 92%, at least 93%, at least 94%, at least 95%, at least 96%, at least 97%, at least 98%, at least 99%, or 100% identity to a SARS-CoV-2 S glycoprotein from a SARS-CoV-2 S omicron variant selected from the group consisting of: BA.1, BA.2.12.1, BA.2, BA.3, BA.4, BA.5, XBB.1.5, XBB.2.3, XBB.1.16, EG.5.1, JN.1, BQ.1.1, BF.7. In embodiments, the secondary antibody is attached to a tag. In embodiments, the tag is horseradish peroxidase. In embodiments, the biological sample is serum, plasma, blood, saliva, a nasopharyngeal swab, or mucus. In embodiments, the biological sample is from a patient that has previously had COVID-19. In embodiments, the biological sample is from a patient that has been administered an immunogenic composition against a SARS-CoV-2 virus or a variant thereof. In embodiments, the SARS-CoV-2 S glycoprotein includes the transmembrane domain. In embodiments, evaluating binding IgG responses to SARS-CoV-2 S glycoprotein in serum results in rapid development of effective vaccines against emerging SARS-CoV-2 variants.

### BRIEF DESCRIPTION OF THE DRAWINGS

[0009] The invention may be more completely understood in consideration of the following detailed description of various embodiments of the invention in connection with the accompanying drawings, in which:

[0010] FIG. 1 presents schematics of the procedure for performing an anti-rS IgG detection assay;

[0011] FIGS. 2A-2C are schematics of assays that show how to detect anti-spike IgG4 (FIG. 2A), anti-spike IgG1 (FIG. 2B) and total anti-spike IgG (FIG. 2C);

[0012] FIG. 3 shows the % of IgG1 out total IgG in the samples at day 1 (before boost) and at day 29 (28 days after boost);

[0013] FIG. 4 shows the % of IgG4 out total IgG in the samples at day 1 (before boost) and at day 29 (28 days after boost);

[0014] FIG. 5 shows the % of IgG4 out total IgG in the samples at day 29 (28 days after boost);

[0015] FIG. 6 shows the % of IgG1 and IgG4 in the samples at day 1 (before boost);

[0016] FIG. 7 shows the % of IgG1 and IgG4 in the samples at day 29 (28 days after boost);

[0017] FIG. 8 shows the total anti-S glycoprotein IgG in the samples;

[0018] FIG. 9 shows the total anti-S glycoprotein IgG1 in the samples;

[0019] FIG. 10 shows the total anti-S glycoprotein IgG4 in the samples.

[0020] FIG. 11 shows inter-assay, intra-assay, and total precision were <20% GCV for all 27 serum samples representing all concentration ranges (low, medium, and high concentrations);

[0021] FIG. 12 shows IgG assay ancestral strain assay specificity;

[0022] FIG. 13 shows IgG assay ancestral strain hemoglobin and lipemic matrix effects;

[0023] FIGS. 14A-14B show IgG assay ancestral strain linearity;

[0024] FIG. 15 shows IgG assay ancestral strain temperature and freeze/thaw stability;

[0025] FIGS. 16A-16F show IgG assay validation parameters for the Beta (FIG. 16B), Delta (FIG. 16C), and Omicron BA.1 (FIG. 16D), BA.5 (FIG. 16E), XBB.1.5 (FIG. 16F) variants were similar to those for the ancestral strain (FIG. 16A);

[0026] FIGS. 17A-17F show correlation of IgG assay results with other immunogenicity assays in SARS-CoV-2 seronegative serum samples;

[0027] FIGS. 18A-18F show correlation of IgG assay results with other immunogenicity assays in SARS-CoV-2 seropositive serum samples;

[0028] FIG. 19A shows IgG subclass serum concentrations after repeated SARS-CoV-2 vaccination;

[0029] FIG. 19B shows Surrogate Fc effector function responses after repeated SARS-CoV-2 vaccination.

[0030] While the invention is amenable to various modifications and alternative forms, specifics thereof have been shown by way of example in the drawings and will be described in detail. It should be understood, however, that the intention is not to limit the invention to the particular embodiments described. On the contrary, the intention is to cover all modifications, equivalents, and alternatives falling within the spirit and scope of the invention as defined by the appended claims.

### DETAILED DESCRIPTION OF THE INVENTION

### Definitions

[0031] As used herein, and in the appended claims, the singular forms “a”, “an”, and “the” include plural referents unless the context clearly dictates otherwise. Thus, for example, reference to “a protein” can refer to one protein or to mixtures of such protein, and reference to “the method” includes reference to equivalent steps and/or methods known to those skilled in the art, and so forth.

[0032] As used herein, the term “adjuvant” refers to a compound that, when used in combination with an immunogen, augments or otherwise alters or modifies the immune response induced against the immunogen. Modification of the immune response may include intensification or broadening the specificity of either or both antibody and cellular immune responses.

[0033] As used herein, the term “about” or “approximately” when preceding a numerical value indicates the value plus or minus a range of 10%. For example, “about 100” encompasses 90 and 110. As used herein, an “immunogenic composition” is a composition that comprises an antigen where administration of the composition to a subject results in the development in the subject of a humoral and/or a cellular immune response to the antigen.

[0034] As used herein, a “subunit” composition, for example a vaccine, that includes one or more selected antigens but not all antigens from a pathogen. Such a composition is substantially free of intact virus or the lysate of such cells or particles and is typically prepared from at least partially purified, often substantially purified immunogenic polypeptides from the pathogen. The antigens in the subunit composition disclosed herein are typically prepared recombinantly, often using a baculovirus system.

[0035] As used herein, “substantially” refers to isolation of a substance (e.g. a compound, polynucleotide, or polypeptide) such that the substance forms the majority percent of the sample in which it is contained. For example, in a sample, a substantially purified component comprises 85%, preferably 85%-90%, more preferably at least 95%-99.5%, and most preferably at least 99% of the sample. If a component is substantially replaced the amount remaining in a sample is less than or equal to about 0.5% to about 10%, preferably less than about 0.5% to about 1.0%.

[0036] The terms “treat,” “treatment,” and “treating,” as used herein, refer to an approach for obtaining beneficial or desired results, for example, clinical results. For the purposes of this disclosure, beneficial or desired results may include inhibiting or suppressing the initiation or progression of an infection or a disease; ameliorating, or reducing the development of, symptoms of an infection or disease; or a combination thereof.

[0037] “Prevention,” as used herein, is used interchangeably with “prophylaxis” and can mean complete prevention of an infection or disease, or prevention of the development of symptoms of that infection or disease; a delay in the onset of an infection or disease or its symptoms; or a decrease in the severity of a subsequently developed infection or disease or its symptoms.

[0038] As used herein an “effective dose” or “effective amount” refers to an amount of an immunogen sufficient to induce an immune response that reduces at least one symptom of pathogen infection. An effective dose or effective amount may be determined e.g., by measuring amounts of neutralizing secretory and/or serum antibodies, e.g., by plaque neutralization, complement fixation, enzyme-linked immunosorbent (ELISA), or microneutralization assay.

[0039] As used herein, the term “vaccine” refers to an immunogenic composition, such as an immunogen derived from a pathogen, which is used to induce an immune response against the pathogen. The immune response may include formation of antibodies and/or a cell-mediated response. Depending on context, the term “vaccine” may also refer to a suspension or solution of an immunogen that is administered to a subject to produce an immune response. Preferably, vaccines induces an immune response that is effective at preventing infection from SARS-CoV-2 or a variant thereof.

[0040] As used herein, the term “subject” includes humans and other animals. Typically, the subject is a human. For example, the subject may be an adult, a teenager, a child (2 years to 14 years of age), an infant (birth to 2 year), or a neonate (up to 2 months). In particular aspects, the subject is up to 4 months old, or up to 6 months old. In aspects, the adults are seniors about 65 years or older, or about 60 years or older. In aspects, the subject is a pregnant woman or a woman intending to become pregnant. In other aspects, subject is not a human; for example a non-human primate; for example, a baboon, a chimpanzee, a gorilla, or a macaque. In certain aspects, the subject may be a pet, such as a dog or cat.

[0041] As used herein, the term “pharmaceutically acceptable” means being approved by a regulatory agency of a U.S. Federal or a state government or listed in the U.S. Pharmacopeia, European Pharmacopeia or other generally recognized pharmacopeia for use in mammals, and more particularly in humans. These compositions can be useful as a vaccine and/or antigenic compositions for inducing a protective immune response in a vertebrate.

[0042] As used herein, the term “NVX-CoV2373” refers to a vaccine composition comprising the BV2373 Spike glycoprotein (SEQ ID NO: 87) and Fraction A and Fraction C iscom matrix (e.g., MATRIX-M™).

[0043] As used herein, the term “modification” as it refers to a CoV S polypeptide refers to mutation, deletion, or addition of one amino acid of the CoV S polypeptide. The location of a modification within a CoV S polypeptide can be determined based on aligning the sequence of the polypeptide to SEQ ID NO: 1 (CoV S polypeptide containing signal peptide) or SEQ ID NO: 2 (mature CoV S polypeptide lacking a signal peptide).

### Assays for Evaluating the Immunogenicity of Vaccine Compositions Against SARS-CoV-2

[0044] The disclosure provides assays for evaluating the immunogenicity of immunogenic compositions and vaccine compositions against SARS-CoV-2. In embodiments, the assay evaluates the amount of anti-rS proteins IgG1, IgG2, IgG3, and IgG4, and total anti-rS IgG in a biological sample. (see Example 1). Surrogate ADCP (FcγRIIa binding), surrogate ADCC (FcγRIIIa binding), and ADCD (C1q binding) in a biological sample are also evaluated.

[0045] In embodiments, the immunogenic compositions and vaccine compositions contain non-naturally occurring coronavirus (CoV) Spike (5) polypeptides or nanoparticles containing CoV S polypeptides.

[0046] In embodiments, the CoV S polypeptide comprises a sequence that is at least 90%, at least 91%, at least 92%, at least 93%, at least 94%, at least 95%, at least 96%, at least 97%, at least 98%, at least 99%, or 100% identical to SEQ ID NO: 87. The sequence of SEQ ID NO: 87 is in the table below,

SEQ ID NO: 87
QCVNLTTRTQLPPAYTNSFTRGVYYPDKVFRSSVLHSTQDLFLPFFSNVT
WFHAIHVSGTNGTKRFDNPVLPFNDGVYFASTEKSNIIRGWIFGTTLDSK
TQSLLIVNNATNVVIKVCEFQFCNDPFLGVYYHKNNKSWMESEFRVYSSA
NNCTFEYVSQPFLMDLEGKQGNFKNLREFVFKNIDGYFKIYSKHTPINLV
RDLPQGFSALEPLVDLPIGINITRFQTLLALHRSYLTPGDSSSGWTAGAA
AYYVGYLQPRTFLLKYNENGTITDAVDCALDPLSETKCTLKSFTVEKGIY
QTSNFRVQPTESIVRFPNITNLCPFGEVFNATRFASVYAWNRKRISNCVA
DYSVLYNSASFSTFKCYGVSPTKLNDLCFTNVYADSFVIRGDEVRQIAPG
QTGKIADYNYKLPDDFTGCVIAWNSNNLDSKVGGNYNYLYRLFRKSNLKP
FERDISTEIYQAGSTPCNGVEGFNCYFPLQSYGFQPTNGVGYQPYRVVVL
SFELLHAPATVCGPKKSTNLVKNKCVNFNFNGLTGTGVLTESNKKFLPFQ
QFGRDIADTTDAVRDPQTLEILDITPCSFGGVSVITPGTNTSNQVAVLYQ
DVNCTEVPVAIHADQLTPTWRVYSTGSNVFQTRAGCLIGAEHVNNSYECD
IPIGAGICASYQTQTNSPQQAQSVASQSIIAYTMSLGAENSVAYSNNSIA
IPTNFTISVTTEILPVSMTKTSVDCTMYICGDSTECSNLLLQYGSFCTQL
NRALTGIAVEQDKNTQEVFAQVKQIYKTPPIKDFGGFNFSQILPDPSKPS
KRSFIEDLLENKVTLADAGFIKQYGDCLGDIAARDLICAQKFNGLTVLPP
LLTDEMIAQYTSALLAGTITSGWTFGAGAALQIPFAMQMAYRENGIGVTQ
NVLYENQKLIANQFNSAIGKIQDSLSSTASALGKLQDVVNQNAQALNTLV
KQLSSNFGAISSVLNDILSRLDPPEAEVQIDRLITGRLQSLQTYVTQQLI
RAAEIRASANLAATKMSECVLGQSKRVDFCGKGYHLMSFPQSAPHGVVFL
HVTYVPAQEKNFTTAPAICHDGKAHFPREGVFVSNGTHWFVTQRNFYEPQ
IITTDNTFVSGNCDVVIGIVNNTVYDPLQPELDSFKEELDKYFKNHTSPD
VDLGDISGINASVVNIQKEIDRLNEVAKNLNESLIDLQELGKYEQYIKWP
WYIWLGFIAGLIAIVMVTIMLCCMTSCCSCLKGCCSCGSCCKFDEDDSEP
VLKGVKLHYT

[0047] In embodiments, the methods further comprise washing the solid surface. In embodiments, the methods comprise contacting the plate with a blocking buffer. A blocking buffer is a solution that removes the possibility of non-specific binding to the plate.

[0048] In embodiments, the methods may be utilized to detect antibody isotypes selected from the group consisting of IgA, IgG, IgM, IgD, and IgE. In embodiments, the methods may be utilized to detect antibody isotypes selected from the group consisting of IgG1, IgG2, IgG3, and IgG4.

### SARS-COV-2 S Glycoproteins for Use in the Methods

[0049] In embodiments, suitable SARS-COV-2 S glycoproteins for use in the methods described herein include the SARS-COV-2 S glycoproteins associated with Protein Data Bank (PDB) IDs of any one of: 6LVN, 6LZG, 6MOJ, 6M17, 6M1V, 6VSB, 6VW1, 6VXX, 6VYB, 6W41, 6WPS, 6WPT, 6X29, 6X2A, 6 X2B, 6X2C, 6X45, 6X6P, 6X79, 6XC2, 6XC3, 6XC4, 6XC7, 6XCM, 6XCN, 6XDG, 6XE1, 6XEY, 6XF 5, 6XF6, 6XKL, 6XKP, 6XKQ, 6XLU, 6XM0, 6XM3, 6XM4, 6XM5, 6XR8, 6XRA, 6XS6, 6YBB, 6YL A, 6YM0, 6YOR, 6YZ5, 6YZ7, 6Z2M, 6Z43, 6Z97, 6ZB4, 6ZB5, 6ZBP, 6ZCZ, 6ZDG, 6ZDH, 6ZER, 6Z FO, 6ZGE, 6ZGG, 6ZGH, 6ZGI, 6ZH9, 6ZHD, 6ZLR, 6ZOW, 6ZOX, 6ZOY, 6ZOZ, 6ZP0, 6ZP1, 6ZP2, 6ZP5, 6ZP7, 6ZWV, 6ZXN, 7A25, 7A29, 7A4N, 7A5R, 7A5S, 7A91, 7A92, 7A93, 7A94, 7A95, 7A96, 7A97, 7A98, 7AD1, 7AKD, 7BOB, 7B14, 7B17, 7B18, 7B27, 7B30, 7B62, 7BEH, 7BEI, 7BEJ, 7BEK, 7B EL, 7BEM, 7BEN, 7BEO, 7BEP, 7BH9, 7BNM, 7BNN, 7BNO, 7BNV, 7BWJ, 7BYR, 7BZ5, 7C01, 7C2 L, 7C53, 7C8D, 7C8J, 7C8V, 7C8W, 7CAB, 7CAC, 7CAH, 7CAI, 7CAK, 7CAN, 7CDI, 7CDJ, 7CH4, 7 CH5, 7CHB, 7CHC, 7CHE, 7CHF, 7CHH, 7CHO, 7CHP, 7CHS, 7CJF, 7CM4, 7CN9, 7COT, 7CT5, 7C WL, 7CWM, 7CWN, 7CWO, 7CWS, 7CWT, 7CWU, 7CYH, 7CYP, 7CYV, 7CZP, 7CZQ, 7CZR, 7CZS, 7CZT, 7CZU, 7CZV, 7CZW, 7CZX, 7CZY, 7CZZ, 7D00, 7D03, 7DOB, 7DOC, 7DOD, 7D2Z, 7D30, 7D 4G, 7D61, 7DCC, 7DCX, 7DD2, 7DD8, 7DDD, 7DDN, 7DE0, 7DET, 7DEU, 7DF3, 7DF4, 7DHX, 7DJ Z, 7DK0, 7DK2, 7DK3, 7DK4, 7DK5, 7DK6, 7DK7, 7DMU, 7DPM, 7DQA, 7DTE, 7DWX, 7DWY, 7D WZ, 7DX0, 7DX1, 7DX2, 7DX3, 7DX4, 7DX5, 7DX6, 7DX7, 7DX8, 7DX9, 7DZW, 7DZX, 7DZY, 7E2 3, 7E39, 7E3B, 7E3C, 7E3J, 7E3K, 7E3L, 7E30, 7E50, 7E5R, 7E5S, 7E5Y, 7E7B, 7E7D, 7E7X, 7E7Y, 7E86, 7E88, 7E8C, 7E8F, 7E8M, 7E9N, 7E90, 7E9P, 7E9Q, 7E9T, 7EAM, 7EAN, 7EAZ, 7EB0, 7EB3, 7 EB4, 7EB5, 7EDF, 7EDG, 7EDH, 7EDI, 7EDJ, 7EFP, 7EFR, 7EH5, 7EJ4, 7EJ5, 7EJL, 7EJY, 7EJZ, 7EK 0, 7EK6, 7EKC, 7EKE, 7EKF, 7EKG, 7EKH, 7ENF, 7ENG, 7EPX, 7EY0, 7EY4, 7EY5, 7EYA, 7EZV, 7F0X, 7F12, 7F15, 7F3Q, 7F46, 7F5H, 7F5R, 7F62, 7F63, 7F6Y, 7F6Z, 7F7E, 7F7H, 7FAE, 7FAF, 7FAT, 7FAU, 7FB0, 7FB1, 7FB3, 7FB4, 7FBJ, 7FBK, 7FC5, 7FCD, 7FCE, 7FCP, 7FCQ, 7FDG, 7FDH, 7FDI, 7FDK, 7FEM, 7FET, 7FG2, 7FG3, 7FG7, 7FH0, 7FJC, 7FJN, 7FJO, 7FJS, 7JJC, 7JJI, 7JJJ, 7JMO, 7JMP, 7JMW, 7JV2, 7JV4, 7JV6, 7JVA, 7JVB, 7JVC, 7JW0, 7JWB, 7JWY, 7JX3, 7JZL, 7JZM, 7JZN, 7JZU, 7K43, 7K45, 7K4N, 7K8M, 7K8S, 7K8T, 7K8U, 7K8V, 7K8W, 7K8X, 7K8Y, 7K8Z, 7K90, 7K9H, 7K9I, 7K9J, 7K9K, 7K9Z, 7KDG, 7KDH, 7KDI, 7KDJ, 7KDK, 7KDL, 7KE4, 7KE6, 7KE7, 7KE8, 7KE9, 7K EA, 7KEB, 7KEC, 7KFV, 7KFW, 7KFX, 7KFY, 7KGJ, 7KGK, 7KJ2, 7KJ3, 7KJ4, 7KJ5, 7KKK, 7KKL, 7KL9, 7KLG, 7KLH, 7KLW, 7KM5, 7KMB, 7KMG, 7KMH, 7KMI, 7KMK, 7KML, 7KMS, 7KMZ, 7 KN3, 7KN4, 7KN5, 7KN6, 7KN7, 7KNB, 7KNE, 7KNH, 7KNI, 7KQE, 7KRQ, 7KRR, 7KRS, 7KS9, 7 KSG, 7KXJ, 7KXK, 7KZB, 7L02, 7L06, 7L09, 7LON, 7L2C, 7L2D, 7L2E, 7L2F, 7L3N, 7L4Z, 7L56, 7L 57, 7L58, 7L5B, 7L7D, 7L7E, 7L7F, 7L7K, 7LAA, 7LAB, 7LC8, 7LCN, 7LD1, 7LDJ, 7LJR, 7LM8, 7L O4, 7LOP, 7LQ7, 7LQV, 7LQW, 7LRS, 7LRT, 7LS9, 7LSS, 7LWI, 7LWJ, 7LWK, 7LWL, 7LWM, 7L WN, 7LWO, 7LWP, 7LWQ, 7LWS, 7LWT, 7LWU, 7LWV, 7LWW, 7LX5, 7LXW, 7LXX, 7LXY, 7LX Z, 7LY0, 7LY2, 7LY3, 7LYK, 7LYL, 7LYM, 7LYN, 7LY0, 7LYP, 7LYQ, 7MOJ, 7M31, 7M42, 7M53, 7M6D, 7M6E, 7M6F, 7M6G, 7M6H, 7M61, 7M71, 7M7B, 7M7W, 7M8J, 7M8K, 7M8S, 7M8T, 7M8U, 7 MDW, 7ME7, 7MEJ, 7MF1, 7MFU, 7MJG, 7MJH, 7MJI, 7MJJ, 7MJK, 7MJL, 7MJM, 7MJN, 7MKL, 7 MKM, 7MLZ, 7MM0, 7MMO, 7MSQ, 7MTC, 7MTD, 7MTE, 7MW2, 7MW3, 7MW4, 7MW5, 7MW6, 7MY2, 7MY3, 7MY8, 7MZF, 7MZG, 7MZH, 7MZI, 7MZJ, 7MZK, 7MZL, 7MZM, 7MZN, 7NOG, 7NO H, 7NIA, 7NIB, 7NIE, 7NIF, 7NIQ, 7NIT, 7NIU, 7NIV, 7NIW, 7NIX, 7N1Y, 7N31, 7N41, 7N4J, 7N 4L, 7N4M, 7N5H, 7N62, 7N64, 7N6D, 7N6E, 7N8H, 7N81, 7N9A, 7N9B, 7N9C, 7N9E, 7N9T, 7NAB, 7 ND3, 7ND4, 7ND5, 7ND6, 7ND7, 7ND8, 7ND9, 7NDA, 7NDB, 7NDC, 7NDD, 7NEG, 7NEH, 7NKT, 7 NLL, 7NP1, 7NS6, 7NT9, 7NTA, 7NTC, 7NX6, 7NX7, 7NX8, 7NX9, 7NXA, 7NXB, 7NXC, 70AN, 70A0, 70AP, 70AQ, 70AU, 70AY, 7OD3, 7ODL, 7OLZ, 7OR9, 7ORA, 7ORB, 70WX, 7P19, 7P3D, 7P 40, 7P5G, 7P5Q, 7P5S, 7P77, 7P78, 7P79, 7P7A, 7P7B, 7PBE, 7PHG, 7PQY, 7PQZ, 7PR0, 7PRY, 7PRZ, 7PS0, 7PS1, 7PS2, 7PS4, 7PS5, 7PS6, 7PS7, 7Q0A, 7Q0G, 7Q0H, 7Q01, 7QIZ, 7Q3Q, 7Q3R, 7Q6E, 7Q 9F, 7Q9G, 7Q91, 7Q9J, 7Q9K, 7Q9M, 7Q9P, 7QEZ, 7QF0, 7QF1, 7QNW, 7QNX, 7QNY, 7Q07, 7Q09, 7QTI, 7QTJ, 7QTK, 7QUR, 7QUS, 7R0Z, 7R10, 7R11, 7R12, 7R13, 7R14, 7R15, 7R16, 7R17, 7R18, 7R 19, 7R1A, 7R1B, 7R40, 7R41, 7R4Q, 7R4R, 7R6W, 7R6X, 7R7N, 7R8L, 7R8M, 7R8N, 7R80, 7R95, 7R A8, 7RAL, 7RAQ, 7RBU, 7RBV, 7RBY, 7RKU, 7RKV, 7RNJ, 7RPV, 7RQ6, 7RR0, 7RTD, 7RTR, 7R U1, 7RU2, 7RU3, 7RU4, 7RU5, 7RU8, 7RW2, 7RXD, 7RZQ, 7RZR, 7RZS, 7RZT, 7RZU, 7RZV, 7S0B, 7S0C, 7SOD, 7SOE, 7S3N, 7S4S, 7S5P, 7S5Q, 7S5R, 7S61, 7S6J, 7S6K, 7S6L, 7S83, 7SA2, 7SBK, 7SB L, 7SBO, 7SBP, 7SBQ, 7SBR, 7SBS, 7SBT, 7SBU, 7SC1, 7SD5, 7SI2, 7SIS, 7SIX, 7SJ0, 7SJS, 7SKZ, 7 SL5, 7SN0, 7SN2, 7SN3, 7SO9, 7SOA, 7S0B, 7S0C, 7SOD, 7SOE, 7SOF, 7SPO, 7SPP, 7SWN, 7SWO, 7SWP, 7SWW, 7SWX, 7SXR, 7SXS, 7SXT, 7SXU, 7SXV, 7SXW, 7SXX, 7SXY, 7SXZ, 7SY0, 7SY1, 7SY2, 7SY3, 7SY4, 7SY5, 7SY6, 7SY7, 7SY8, 7T01, 7T3M, 7T67, 7T72, 7T7B, 7T9J, 7T9K, 7T9L, 7T AS, 7TAT, 7TB4, 7TB8, 7TBF, 7TCA, 7TCC, 7TCQ, 7TEI, 7TEW, 7TEX, 7TEY, 7TEZ, 7TF0, 7TF1, 7 TF2, 7TF3, 7TF4, 7TF5, 7TF8, 7TGE, 7TGW, 7TGX, 7TGY, 7THE, 7THK, 7THT, 7TIK, 7TL1, 7TL9, 7 TLA, 7TLB, 7TLC, 7TLD, 7TLT, 7TLY, 7TM0, 7TN0, 7TNW, 7TO4, 7TOU, 7TOV, 7TOW, 7TOX, 7T OY, 7TOZ, 7TP0, 7TP1, 7TP2, 7TP3, 7TP4, 7TP7, 7TP8, 7TP9, 7TPA, 7TPC, 7TPE, 7TPF, 7TPH, 7TPK, 7TPL, 7TPR, 7TYZ, 7TZ0, 7U09, 7U0A, 7UOD, 7UOE, 7UON, 7UOP, 7UOQ, 7U0X, 7UIR, 7U2D, 7U2E, 7U8E, 7U90, 7U9P, 7UAP, 7UAQ, 7UAR, 7UB0, 7UB5, 7UB6, 7UFK, 7UFL, 7UHC, 7UL0, 7UM2, 7UPL, 7UR1, 7URQ, 7URS, 7UZ4, 7UZ5, 7UZ6, 7UZ7, 7UZ8, 7UZ9, 7UZA, 7UZB, 7UZC, 7UZD, 7V 20, 7V22, 7V23, 7V24, 7V26, 7V27, 7V2A, 7V76, 7V77, 7V78, 7V79, 7V7A, 7V7D, 7V7E, 7V7F, 7V7 G, 7V7H, 7V71, 7V7J, 7V7N, 7V70, 7V7P, 7V7Q, 7V7R, 7V7S, 7V7T, 7V7U, 7V7V, 7V7Z, 7V80, 7V8 1, 7V82, 7V83, 7V84, 7V85, 7V86, 7V87, 7V88, 7V89, 7V8A, 7V8B, 7V8C, 7VHH, 7VHJ, 7VHK, 7VH L, 7VHM, 7VHN, 7VMU, 7VNB, 7VNC, 7VND, 7VNE, 7VOA, 7VQ0, 7VRV, 7VRW, 7VX1, 7VX4, 7 VX5, 7VX9, 7VXA, 7VXB, 7VXC, 7VXD, 7VXE, 7VXF, 7VX1, 7VXK, 7VXM, 7VYR, 7VZT, 7WIS, 7W6U, 7W8S, 7W92, 7W94, 7W99, 7W9B, 7W9C, 7W9E, 7W9F, 7WA1, 7WB5, 7WBL, 7WBP, 7WB Q, 7WBZ, 7WCD, 7WCH, 7WCK, 7WCP, 7WCR, 7WCU, 7WCZ, 7WD0, 7WD1, 7WD2, 7WD7, 7W D8, 7WD9, 7WDF, 7WE7, 7WE8, 7WE9, 7WEA, 7WEB, 7WEC, 7WED, 7WEE, 7WEF, 7WEV, 7WG 6, 7WG7, 7WG8, 7WG9, 7WGB, 7WGC, 7WGV, 7WGX, 7WGY, 7WGZ, 7WH8, 7WHB, 7WHD, 7W HH, 7WHI, 7WHJ, 7WHK, 7WHZ, 7WJY, 7WJZ, 7WK0, 7WK2, 7WK3, 7WK4, 7WK5, 7WK6, 7WK 8, 7WK9, 7WKA, 7WLC, 7WM0, 7WN2, 7WNB, 7WNM, 7WO4, 7WO5, 7W07, 7WOA, 7WOB, 7W OC, 7WOG, 7WON, 7WOP, 7WOQ, 7WOR, 7WOS, 7WOU, 7WOV, 7WOW, 7WP0, 7WP1, 7WP2, 7 WP5, 7WP6, 7WP8, 7WP9, 7WPA, 7WPB, 7WPC, 7WPD, 7WPE, 7WPF, 7 WPH, 7WQV, 7WR8, 7W RH, 7WRI, 7WRJ, 7WRV, 7WS0, 7WS1, 7WS2, 7WS3, 7WS4, 7WS5, 7WS6, 7WS7, 7WS8, 7WS9, 7 WSA, 7WSE, 7WSH, 7WSK, 7WT7, 7WT8, 7WT9, 7WTF, 7WTG, 7WTH, 7WTI, 7WTJ, 7WTK, 7W UE, 7WUH, 7WVL, 7WVP, 7WVQ, 7WWI, 7WWJ, 7WWK, 7WWL, 7WWM, 7WXZ, 7WZ1, 7WZ2, 7X1M, 7X25, 7X2H, 7X2K, 7X2L, 7X2M, 7X63, 7×66, 7×6A, 7X7D, 7X7E, 7X7N, 7X7T, 7X7U, 7X8 W, 7X8Y, 7X8Z, 7X90, 7×91, 7×92, 7X93, 7×94, 7×95, 7X96, 7X9E, 7XA7, 7XAZ, 7XB0, 7XB1, 7XBY, 7XCH, 7XCI, 7XCK, 7XCO, 7XCP, 7XCZ, 7XD2, 7XDA, 7XDB, 7XDK, 7XDL, 7XEG, 7XEI, 7X H8, 7XIC, 7XID, 7XIK, 7XIL, 7XIW, 7XIX, 7XIY, 7XIZ, 7XJ6, 7XJ8, 7XJ9, 7XMX, 7XMZ, 7XNQ, 7X NR, 7XNS, 7X04, 7×05, 7×06, 7X07, 7×08, 7×09, 7XOA, 7XOB, 7XOC, 7XOD, 7XRP, 7XS8, 7X SA, 7XSB, 7XSC, 7XST, 7XTZ, 7XU0, 7XU1, 7XU2, 7XU3, 7XU4, 7XU5, 7XU6, 7XWA, 7XXL, 7Y0 C, 7Y0V, 7Y1Y, 7Y1Z, 7Y42, 7Y6D, 7Y6K, 7Y6L, 7Y6N, 7Y75, 7Y76, 7Y7J, 7Y7K, 7Y8J, 7Y9N, 7Y9 S, 7Y9Z, 7YA0, 7YA1, 7YAD, 7YBI, 7YBJ, 7YC5, 7YCK, 7YCL, 7YCN, 7YCO, 7YD1, 7YDI, 7YDY, 7YE5, 7YE9, 7YEG, 7YH6, 7YH7, 7YHW, 7YJ3, 7YKJ, 7YOW, 7YQT, 7YQU, 7YQV, 7YQW, 7YQ X, 7YQY, 7YQZ, 7YR0, 7YR1, 7YR2, 7YR3, 7YTN, 7YUE, 7YV8, 7YVE, 7YVF, 7YVG, 7YVH, 7YV 1, 7YVJ, 7YVK, 7YVL, 7YVM, 7YVN, 7YVO, 7YVP, 7YVU, 7Z0X, 7Z0Y, 7ZIA, 7Z1B, 7ZIC, 7ZID, 7ZIE, 7Z3Z, 7Z6V, 7Z7X, 7Z85, 7Z86, 7Z80, 7Z9Q, 7Z9R, 7ZBU, 7ZCE, 7ZCF, 7ZDQ, 7ZF3, 7ZF4, 7 ZF5, 7ZF7, 7ZF8, 7ZF9, 7ZFA, 7ZFB, 7ZFC, 7ZFD, 7ZFE, 7ZJL, 7ZR2, 7ZR7, 7ZR8, 7ZR9, 7ZRC, 7Z RV, 7ZSD, 7ZSS, 7ZXU, 8A99, 8AAA, 8AQS, 8AQT, 8AQU, 8AQV, 8AQW, 8BBN, 8BBO, 8BCZ, 8B E1, 8BEV, 8BGG, 8BH5, 8BON, 8BSE, 8BSF, 8CIV, 8C3V, 8C8P, 8CIM, 8CSA, 8CSJ, 8CWI, 8CWK, 8CWU, 8CWV, 8CXN, 8CXQ, 8CY6, 8CY7, 8CY9, 8CYA, 8CYB, 8CYC, 8CYD, 8CYJ, 8CZI, 8DOZ, 8D36, 8D47, 8D48, 8D55, 8D56, 8D5A, 8D6Z, 8D8Q, 8D8R, 8DAD, 8DAO, 8DCC, 8DCE, 8DF5, 8DG U, 8DI5, 8DLI, 8DLJ, 8DLK, 8DLL, 8DLM, 8DLN, 8DLO, 8DLP, 8DLQ, 8DLR, 8DLS, 8DLT, 8DLU, 8DLV, 8DLW, 8DLX, 8DLY, 8DLZ, 8DM0, 8DM1, 8DM2, 8DM3, 8DM4, 8DM5, 8DM6, 8DM7, 8D M8, 8DM9, 8DMA, 8DNN, 8DT3, 8DT8, 8DTR, 8DTT, 8DTX, 8DV1, 8DV2, 8DW2, 8DW3, 8DW9, 8 DWA, 8DXS, 8DXT, 8DXU, 8DYA, 8DZH, 8DZI, 8E1G, 8EL2, 8ELH, 8ELJ, 8ELO, 8ELP, 8ELQ, 8E O0, 8EPN, 8EPP, 8EPQ, 8ERQ, 8ERR, 8F0G, 8F0H, 8FA1, 8FA2, 8FEZ, 8FU7, 8FU8, 8FU9, 8GB0, 8G B5, 8GB6, 8GB7, 8GB8, 8GJM, 8GJN, 8GOM, 8GON, 8GOU, 8GPY, 8GRY, 8GS6, 8GS9, 8GTO, 8GT P, 8GTQ, 8GX9, 8GZ5, 8GZZ, 8H00, 8H01, 8H06, 8H07, 8H08, 8H3D, 8H3E, 8H3M, 8H3N, 8H5C, 8H C2, 8HC3, 8HC4, 8HC5, 8HC6, 8HC7, 8HC8, 8HC9, 8HCA, 8HCB, 8HEB, 8HEC, 8HED, 8HHX, 8HH Y, 8HHZ, 8HN6, 8HN7, 815H, 8151, 8IDN, 8IF2, 8IOS, 8IOT, 8IOU, 8IOV, 8ITU, 8JIQ, 8J26, or 8SMT. Each of these PDB IDs is incorporated by reference herein in its entirety. The amino acid sequence of the SARS-COV-2 S glycoprotein associated with each entry may be accessed using FASTA.

[0050] In embodiments, the SARS-COV-2 S glycoprotein is a wild-type SARS-COV-2 S glycoprotein, or a SARS-COV-2 S glycoprotein from a SARS-COV-2 variant thereof. In embodiments, the variant of SARS-COV-2 is a B.1.1.7 SARS-COV-2 strain; a B.1.351 SARS-CoV-2 strain; a P.1 SARS-COV-2 strain; a Cal.20C SARS-COV-2 strain; a B.1.617.2 SARS-COV-2 strain; a B.1.525 SARS-COV-2 strain; a B.1.526 SARS-COV-2 strain; a B.1.617.1 SARS-COV-2 strain; a C.37 SARS-CoV-2 strain; a B.1.621 SARS-CoV-2 strain; or a B.1.1.529 SARS-CoV-2 strain. In embodiments, the SARS-CoV-2 S glycoprotein contains a transmembrane domain.

[0051] The wild-type SARS-CoV-2 S glycoprotein contains a furin cleavage site, RRAR (SEQ ID NO: 6) at positions 669-672 of the SARS-CoV-2 S glycoprotein of SEQ ID NO: 2. In embodiments, the SARS-CoV-2 S glycoprotein has an inactive furin cleavage site. In embodiments, the inactive furin cleavage site has the amino acid sequence of any one of SEQ ID NOS: 7-34, 97, and 111. In embodiments, the amino acid sequence of the inactive furin cleavage site is GG.

[0052] In embodiments, the amino acid sequence of the inactive furin cleavage site is QQAQ (SEQ ID NO: 7).

[0053] In embodiments, one or more of the amino acids comprising the native furin cleavage site is mutated to any natural amino acid. In embodiments, one or more of the amino acids comprising the native furin cleavage site is deleted.

[0054] In embodiments, one or more of the amino acids comprising the native furin cleavage site is mutated to glutamine. In embodiments, 1, 2, 3, or 4 amino acids may be mutated to glutamine. In embodiments, one of the arginines comprising the native furin cleavage site is mutated to glutamine. In embodiments, two of the arginines comprising the native furin cleavage site are mutated to glutamine. In embodiments, three of the arginines comprising the native furin cleavage site are mutated to glutamine.

[0055] In embodiments, one or more of the amino acids comprising the native furin cleavage site, is mutated to alanine. In embodiments, 1, 2, 3, or 4 amino acids may be mutated to alanine. embodiments, one of the arginines comprising the native furin cleavage site is mutated to alanine. In embodiments, two of the arginines comprising the native furin cleavage site are mutated to alanine. In embodiments, three of the arginines comprising the native furin cleavage site are mutated to alanine.

[0056] In embodiments, one or more of the amino acids comprising the native furin cleavage site is mutated to glycine. In embodiments, 1, 2, 3, or 4 amino acids may be mutated to glycine. In embodiments, one of the arginines of the native furin cleavage site is mutated to glycine. In embodiments, two of the arginines comprising the native furin cleavage site are mutated to glycine. In embodiments, three of the arginines comprising the native furin cleavage site are mutated to glycine.

[0057] In embodiments, one or more of the amino acids comprising the native furin cleavage site, is mutated to asparagine. For example 1, 2, 3, or 4 amino acids may be mutated to asparagine. In embodiments, one of the arginines comprising the native furin cleavage site is mutated to asparagine. In embodiments, two of the arginines comprising the native furin cleavage site are mutated to asparagine. In embodiments, three of the arginines comprising the native furin cleavage site are mutated to asparagine.

[0058] In embodiments, the active furin cleavage site (SEQ ID NO: 67) of the SARS-CoV-2 S glycoproteins described herein is replaced with an inactivated furin cleavage site of the table below.

### Inactivated Furin Cleavage Sites

| Amino Acid Sequence of Furin | Active or Inactive Furin |
|---|---|
| Cleavage Site | Cleavage Site |
| RRAR (SEQ ID NO: 6) | Active |
| QQAQ (SEQ ID NO: 7) | Inactive |
| QRAR (SEQ ID NO: 8) | Inactive |
| RQAR (SEQ ID NO: 9) | Inactive |
| RRAQ (SEQ ID NO: 10) | Inactive |
| QQAR (SEQ ID NO: 11) | Inactive |
| RQAQ (SEQ ID NO: 12) | Inactive |
| QRAQ (SEQ ID NO: 13) | Inactive |
| NNAN (SEQ ID NO: 14) | Inactive |
| NRAR (SEQ ID NO: 15) | Inactive |
| RNAR (SEQ ID NO: 16) | Inactive |
| RRAN (SEQ ID NO: 17) | Inactive |
| NNAR (SEQ ID NO: 18) | Inactive |
| RNAN (SEQ ID NO: 19) | Inactive |
| NRAN (SEQ ID NO: 20) | Inactive |
| AAAA (SEQ ID NO: 21) | Inactive |
| ARAR (SEQ ID NO: 22) | Inactive |
| RAAR (SEQ ID NO: 23) | Inactive |
| RRAA (SEQ ID NO: 24) | Inactive |
| AAAR (SEQ ID NO: 25) | Inactive |
| RAAA (SEQ ID NO: 26) | Inactive |
| ARAA (SEQ ID NO: 27) | Inactive |
| GGAG (SEQ ID NO: 28) | Inactive |
| GRAR (SEQ ID NO: 29) | Inactive |
| RGAR (SEQ ID NO: 30) | Inactive |
| RRAG (SEQ ID NO: 31) | Inactive |
| GGAR (SEQ ID NO: 32) | Inactive |
| RGAG (SEQ ID NO: 33) | Inactive |
| GRAG (SEQ ID NO: 34) | Inactive |
| GSAS (SEQ ID NO: 97) | Inactive |
| GSGA (SEQ ID NO: 111) | Inactive |

[0059] In embodiments, the SARS-CoV-2 S glycoproteins contain a mutation at Lys-973 of the native SARS-CoV-2 S glycoprotein (SEQ ID NO: 2). In embodiments, Lys-973 is mutated to any natural amino acid. In embodiments, Lys-973 is mutated to proline. In embodiments, Lys-973 is mutated to glycine.

[0060] In embodiments, the SARS-CoV-2 S glycoproteins contain a mutation at Val-974 of the native SARS-CoV-2 S glycoprotein (SEQ ID NO: 2). In embodiments, Val-974 is mutated to any natural amino acid, as compared to the SARS-CoV-2 S glycoprotein of SEQ ID NO: 2. In embodiments, Val-974 is mutated to proline. In embodiments, Val-974 is mutated to glycine, as compared to the SARS-CoV-2 S glycoprotein of SEQ ID NO: 2.

[0061] In embodiments, the SARS-CoV-2 S glycoproteins contain a mutation at Lys-973 and Val-974 of the native CoV Spike (S) polypeptide (SEQ ID NO: 2). In embodiments, Lys-973 and Val-974 are mutated to any natural amino acid, as compared to the SARS-CoV-2 S glycoprotein of SEQ ID NO: 2. In embodiments, Lys-973 and Val-974 are mutated to proline, as compared to the SARS-CoV-2 S glycoprotein of SEQ ID NO: 2. An exemplary SARS-CoV-2 S glycoprotein that contains proline at positions 973 and 974 is the glycoprotein of SEQ ID NO: 87, wherein the SARS-CoV-2 S glycoprotein is numbered according to SEQ ID NO: 2.

[0062] In embodiments, the SARS-CoV-2 S glycoprotein has at least 80%, at least 81%, at least 82%, at least 83%, at least 84%, at least 85%, at least 86%, at least 87%, at least 88%, at least 89%, at least 90%, at least 91%, at least 92%, at least 93%, at least 94%, at least 95%, at least 96%, at least 97%, at least 98%, at least 99%, or 100% identity to a polypeptide of any one of SEQ ID NOS: 2, 4, 38, 41, 44, 48, 51, 54, 58, 61, 63, 65, 67, 73, 75, 78, 79, 82, 83, 85, 87, 89, 106, 110, 132, 133, 114, 138, 141, 144, 147, 151, 153, 156, 158, 174, 175, 176, 181-184, 186, 188, 190, 195, 217-228 233-236, 243, 255-264, 273-280, 283-284, 287-288, 291-292, 294, 296, 298, 300, 302, 304, 306, 308, 310, 312, 314, 316, 318, 320, 322, 324, 236, 328, 329, 330, 331, 332 and 333.

Providing a Surface Coated with a SARS-CoV-2 S Glycoprotein

[0063] In embodiments, the methods described herein require providing a surface coated with a SARS-CoV-2 S glycoprotein. Numerous examples of SARS-CoV-2 S glycoproteins are provided herein. In embodiments, the surface is a chip or a microplate. In embodiments, the microplate comprises polystyrene. In embodiments, the microplate is 96-well or 384-well polystyrene plate. In embodiments, the surface is a microplate that is filled with a solution.

### Exposing the Surface to a Biological Sample

[0064] In embodiments, the surface is exposed to a biological sample. In embodiments, the surface is exposed to the biological sample for from 10 minutes to about 72 hours. In embodiments, the surface is exposed to the biological sample for about 10 minutes, about 15 minutes, about 20 minutes, about 25 minutes, about 30 minutes, about 35 minutes, about 40 minutes, about 45 minutes, about 50 minutes, about 55 minutes, about 1 hour, about 2 hours, about 3 hours, about 4 hours, about 5 hours, about 6 hours, about 7 hours, about 8 hours, about 9 hours, about 10 hours, about 11 hours, about 12 hours, about 13 hours, about 14 hours, about 15 hours, about 16 hours, about 17 hours, about 18 hours, about 19 hours, about 20 hours, about 21 hours, about 22 hours, about 23 hours, about 24 hours, about 25 hours, about 26 hours, about 27 hours, about 28 hours, about 29 hours, about 30 hours, about 31 hours, about 32 hours, about 33 hours, about 34 hours, about 35 hours, about 36 hours, about 37 hours, about 38 hours, about 39 hours, about 40 hours, about 41 hours, about 42 hours, about 43 hours, about 44 hours, about 45 hours, about 46 hours, about 47 hours, about 48 hours, about 49 hours, about 50 hours, about 51 hours, about 52 hours, about 53 hours, about 54 hours, about 55 hours, about 56 hours, about 57 hours, about 58 hours, about 59 hours, about 60 hours, about 61 hours, about 62 hours, about 63 hours, about 64 hours, about 65 hours, about 66 hours, about 67 hours, about 68 hours, about 69 hours, about 70 hours, about 71 hours, or about 72 hours, including any range or any value therebetween. In embodiments, the surface is exposed to the biological sample for about 1 hour or 2 hours. In embodiments, the surface is exposed to the biological sample for about 2 hours. In embodiments, the surface is exposed to the biological sample at a temperature from 2-8° C. or from 8-37° C. In embodiments, the surface is exposed to the biological sample at a temperature of 2° C., about 3° C., about 4° C., about 5° C., about 6° C., about 7° C., about 8° C., about 9° C., about 10° C., about 11° C., about 12° C., about 13° C., about 14° C., about 15° C., about 16° C., about 17° C., about 18° C., about 19° C., about 20° C., about 21° C., about 22° C., about 23° C., about 24° C., about 25° C., about 26° C., about 27° C., about 28° C., about 29° C., about 30° C., about 31° C., about 32° C., about 33° C., about 34° C., about 35° C., about 36° C., or about 37° C.

[0065] In embodiments, the biological sample is saliva, a nasopharyngeal swab, sputum, saliva, urine, a fecal sample, cerebrospinal fluid, synovial fluid, serum, blood, or plasma. In embodiments, the biological sample is from a patient that has previously had COVID-19. In embodiments, the biological sample is from a patient that has been administered an immunogenic composition against a SARS-CoV-2 virus or a variant thereof.

### Exposing the Surface to a Secondary Antibody

[0066] In embodiments, the surface is exposed to a secondary antibody. In embodiments, the secondary antibody is an anti-human IgG4 antibody. An anti-human IgG4 antibody binds to IgG4 antibodies. In embodiments, the secondary antibody is an anti-human IgG1 antibody. An anti-human IgG1 antibody binds to IgG1 antibodies. In embodiments, the secondary antibody is an anti-human IgG antibody. An anti-human IgG antibody binds to all IgG.

[0067] In embodiments, the secondary antibody is attached to a tag. In embodiments, the secondary antibody is covalently attached to a tag. In embodiments, the secondary antibody is non-covalently attached to a tag. In embodiments, the tag is a His tag. In embodiments, the tag contains an epitope. For example, the tag may be a polyglutamate tag, a FLAG-tag, a HA-tag, a polyHis-tag (having about 5-10 histidines) (SEQ ID NO: 101), a hexahistidine tag (SEQ ID NO: 100), an 8X-His-tag (having eight histidines) (SEQ ID NO: 102), a Myc-tag, a Glutathione-S-transferase-tag, a Green fluorescent protein-tag, Maltose binding protein-tag, a Thioredoxin-tag, or an Fc-tag. In embodiments, the tag is a protease cleavage site. Non-limiting examples of protease cleavage sites include the HRV3C protease cleavage site, chymotrypsin, trypsin, elastase, endopeptidase, caspase-1, caspase-2, caspase-3, caspase-4, caspase-5, caspase-6, caspase-7, caspase-8, caspase-9, caspase-10, enterokinase, factor Xa, Granzyme B, TEV protease, and thrombin. In embodiments, the protease cleavage site is an HRV3C protease cleavage site. In embodiments, the tag is horseradish peroxidase (HRP).

[0068] In embodiments, the surface is exposed to secondary antibody for from 10 minutes to about 72 hours. In embodiments, the surface is exposed to secondary antibody for about 10 minutes, about 15 minutes, about 20 minutes, about 25 minutes, about 30 minutes, about 35 minutes, about 40 minutes, about 45 minutes, about 50 minutes, about 55 minutes, about 1 hour, about 2 hours, about 3 hours, about 4 hours, about 5 hours, about 6 hours, about 7 hours, about 8 hours, about 9 hours, about 10 hours, about 11 hours, about 12 hours, about 13 hours, about 14 hours, about 15 hours, about 16 hours, about 17 hours, about 18 hours, about 19 hours, about 20 hours, about 21 hours, about 22 hours, about 23 hours, about 24 hours, about 25 hours, about 26 hours, about 27 hours, about 28 hours, about 29 hours, about 30 hours, about 31 hours, about 32 hours, about 33 hours, about 34 hours, about 35 hours, about 36 hours, about 37 hours, about 38 hours, about 39 hours, about 40 hours, about 41 hours, about 42 hours, about 43 hours, about 44 hours, about 45 hours, about 46 hours, about 47 hours, about 48 hours, about 49 hours, about 50 hours, about 51 hours, about 52 hours, about 53 hours, about 54 hours, about 55 hours, about 56 hours, about 57 hours, about 58 hours, about 59 hours, about 60 hours, about 61 hours, about 62 hours, about 63 hours, about 64 hours, about 65 hours, about 66 hours, about 67 hours, about 68 hours, about 69 hours, about 70 hours, about 71 hours, or about 72 hours, including any range or any value therebetween. In embodiments, the surface is exposed to secondary antibody for about 1 hour.

Detecting Anti-SARS-CoV-2 IgG1, IgG4, and Total IgG that is Bound to the Surface

[0069] In embodiments, the methods comprise detecting the anti-SARS-CoV-2 IgG1, IgG4, and total IgG that is bound to the surface.

[0070] In embodiments, detecting anti-SARS-CoV-2 IgG1 comprises (i) contacting the surface with a secondary antibody that binds to IgG1 antibodies, wherein the antibody is tagged with horseradish peroxidase; and (ii) contacting the surface with 3,3′,5,5′-tetramethylbenzidine substrate. In embodiments, detecting anti-SARS-CoV-2 IgG4 comprises (i) contacting the surface with a secondary antibody that binds to IgG4 antibodies, wherein the antibody is tagged with horseradish peroxidase; and (ii) contacting the surface with 3,3′,5,5′-tetramethylbenzidine substrate. In embodiments, detecting anti-SARS-CoV-2 IgG comprises (i) contacting the surface with a secondary antibody that binds to IgG antibodies, wherein the antibody is tagged with horseradish peroxidase; and (ii) contacting the surface with 3,3′,5,5′-tetramethylbenzidine substrate. In embodiments, detecting comprises determining the absorbance of the surface. In embodiments, detecting comprises determining the absorbance of the surface at a wavelength from 400 nm to about 650 nm. In embodiments, detecting comprises determining the absorbance of the surface at a wavelength of about 400 nm, about 410 nm, about 420 nm, about 430 nm, about 440 nm, about 450 nm, about 460 nm, about 470 nm, about 480 nm, about 490 nm, about 500 nm, about 510 nm, about 520 nm, about 530 nm, about 540 nm, about 550 nm, about 560 nm, about 570 nm, about 580 nm, about 590 nm, about 600 nm, about 610 nm, about 620 nm, about 630 nm, about 640 nm, or about 650 nm, including all values and ranges therebetween. In embodiments, detecting comprises determining the absorbance of the surface at a wavelength of about 450 nm. In embodiments, the surface is contacted with 3,3′,5,5′-tetramethylbenzidine substrate for about 5 minutes to about 1 hour. In embodiments, the surface is contacted with 3,3′,5,5′-tetramethylbenzidine substrate for about 20 minutes.

[0071] In embodiments, the methods used herein can be used to evaluate the immunogenicity of compositions and vaccine compositions against SARS-CoV-2. In embodiments, the immunogenic compositions and vaccine compositions target a SARS-CoV-2 virus, or a heterogeneous SARS-CoV-2 strain. In embodiments, the immunogenic composition or vaccine composition comprises a SARS-CoV-2 S glycoprotein or a nucleic acid (e.g., mRNA) that encodes a SARS-CoV-2 S glycoprotein. In embodiments, the immunogenic composition or vaccine composition comprises a viral vector that expresses a SARS-CoV-2 S glycoprotein. In embodiments, the immunogenic compositions or vaccine compositions comprise a SARS-CoV-2 S glycoprotein that is at least 80%, at least 81%, at least 82%, at least 83%, at least 84%, at least 85%, at least 86%, at least 87%, at least 88%, at least 89%, at least 90%, at least 91%, at least 92%, at least 93%, at least 94%, at least 95%, at least 96%, at least 97%, at least 98%, at least 99%, or 100% identical to SEQ ID NO: 87.

[0072] In embodiments, the immunogenic compositions or vaccine compositions comprise an adjuvant. Exemplary adjuvants are described below.

### Aluminum-Based Adjuvants

[0073] In embodiments, the adjuvant may be alum (e.g. AlPO₄ or Al(OH)₃). Typically, the nanoparticle is substantially bound to the alum. For example, the nanoparticle may be at least 80% bound, at least 85% bound, at least 90% bound or at least 95% bound to the alum. Often, the nanoparticle is 92% to 97% bound to the alum in a composition. The amount of alum is present per dose is typically in a range between about 400 μg to about 1250 μg. For example, the alum may be present in a per dose amount of about 300 μg to about 900 μg, about 400 μg to about 800 μg, about 500 μg to about 700 μg, about 400 μg to about 600 μg, or about 400 μg to about 500 μg. Typically, the alum is present at about 400 μg for a dose of 120 μg of the protein nanoparticle.

### Saponin Adjuvants

[0074] Adjuvants containing saponin may also be combined with the immunogens disclosed herein. Saponins are glycosides derived from the bark of the Quillaja saponaria Molina tree. Typically, saponin is prepared using a multi-step purification process resulting in multiple fractions. As used, herein, the term “a saponin fraction from Quillaja saponaria Molina” is used generically to describe a semi-purified or defined saponin fraction of Quillaja saponaria or a substantially pure fraction thereof.

### Saponin Fractions

[0075] Several approaches for producing saponin fractions are suitable. Fractions A, B, and C are described in U.S. Pat. No. 6,352,697 and may be prepared as follows. A lipophilic fraction from Quil A, a crude aqueous Quillaja saponaria Molina extract, is separated by chromatography and eluted with 70% acetonitrile in water to recover the lipophilic fraction. This lipophilic fraction is then separated by semi-preparative HPLC with elution using a gradient of from 25% to 60% acetonitrile in acidic water. The fraction referred to herein as “Fraction A” or “QH-A” is, or corresponds to, the fraction, which is eluted at approximately 39% acetonitrile. The fraction referred to herein as “Fraction B” or “QH-B” is, or corresponds to, the fraction, which is eluted at approximately 47% acetonitrile. The fraction referred to herein as “Fraction C” or “QH-C” is, or corresponds to, the fraction, which is eluted at approximately 49% acetonitrile. Additional information regarding purification of Fractions is found in U.S. Pat. No. 5,057,540. When prepared as described herein, Fractions A, B and C of Quillaja saponaria Molina each represent groups or families of chemically closely related molecules with definable properties. The chromatographic conditions under which they are obtained are such that the batch-to-batch reproducibility in terms of elution profile and biological activity is highly consistent.

[0076] Other saponin fractions have been described. Fractions B3, B4 and B4b are described in EP 0436620. Fractions QA1-QA22 are described EP03632279 B2, Q-VAC (Nor-Feed, AS Denmark), Quillaja saponaria Molina Spikoside (lsconova AB, Ultunaallén 2B, 756 51 Uppsala, Sweden). Fractions QA-1, QA-2, QA-3, QA-4, QA-5, QA-6, QA-7, QA-8, QA-9, QA-10, QA-11, QA-12, QA-13, QA-14, QA-15, QA-16, QA-17, QA-18, QA-19, QA-20, QA-21, and QA-22 of EP 0 3632 279 B2, especially QA-7, QA-17, QA-18, and QA-21 may be used. They are obtained as described in EP 0 3632 279 B2, especially at page 6 and in Example 1 on page 8 and 9.

[0077] The saponin fractions described herein and used for forming adjuvants are often substantially pure fractions; that is, the fractions are substantially free of the presence of contamination from other materials. In particular aspects, a substantially pure saponin fraction may contain up to 40% by weight, up to 30% by weight, up to 25% by weight, up to 20% by weight, up to 15% by weight, up to 10% by weight, up to 7% by weight, up to 5% by weight, up to 2% by weight, up to 1% by weight, up to 0.5% by weight, or up to 0.1% by weight of other compounds such as other saponins or other adjuvant materials.

### ISCOM Structures

[0078] Saponin fractions may be administered in the form of a cage-like particle referred to as an ISCOM (Immune Stimulating COMplex). ISCOMs may be prepared as described in EP0109942B1, EP0242380B1 and EP0180546 B1. In particular embodiments a transport and/or a passenger antigen may be used, as described in EP 9600647-3 (PCT/SE97/00289).

### Matrix Adjuvants

[0079] In embodiments, the ISCOM is an ISCOM matrix complex. An ISCOM matrix complex comprises at least one saponin fraction and a lipid. The lipid is at least a sterol, such as cholesterol. In particular aspects, the ISCOM matrix complex also contains a phospholipid. The ISCOM matrix complexes may also contain one or more other immunomodulatory (adjuvant-active) substances, not necessarily a glycoside, and may be produced as described in EP0436620B1, which is incorporated by reference in its entirety herein.

[0080] In other aspects, the ISCOM is an ISCOM complex. An ISCOM complex contains at least one saponin, at least one lipid, and at least one kind of antigen or epitope. The ISCOM complex contains antigen associated by detergent treatment such that that a portion of the antigen integrates into the particle. In contrast, ISCOM matrix is formulated as an admixture with antigen and the association between ISCOM matrix particles and antigen is mediated by electrostatic and/or hydrophobic interactions.

[0081] According to one embodiment, the saponin fraction integrated into an ISCOM matrix complex or an ISCOM complex, or at least one additional adjuvant, which also is integrated into the ISCOM or ISCOM matrix complex or mixed therewith, is selected from fraction A, fraction B, or fraction C of Quillaja saponaria, a semipurified preparation of Quillaja saponaria, a purified preparation of Quillaja saponaria, or any purified sub-fraction e.g., QA 1-21.

[0082] In particular aspects, each ISCOM particle may contain at least two saponin fractions. Any combinations of weight % of different saponin fractions may be used. Any combination of weight % of any two fractions may be used. For example, the particle may contain any weight % of fraction A and any weight % of another saponin fraction, such as a crude saponin fraction or fraction C, respectively. Accordingly, in particular aspects, each ISCOM matrix particle or each ISCOM complex particle may contain from 0.1 to 99.9 by weight, 5 to 95% by weight, 10 to 90% by weight 15 to 85% by weight, 20 to 80% by weight, 25 to 75% by weight, 30 to 70% by weight, 35 to 65% by weight, 40 to 60% by weight, 45 to 55% by weight, 40 to 60% by weight, or 50% by weight of one saponin fraction, e.g. fraction A and the rest up to 100% in each case of another saponin e.g. any crude fraction or any other faction e.g. fraction C. The weight is calculated as the total weight of the saponin fractions. Examples of ISCOM matrix complex and ISCOM complex adjuvants are disclosed in U.S Published Application No. 2013/0129770, which is incorporated by reference in its entirety herein.

[0083] In particular embodiments, the ISCOM matrix or ISCOM complex comprises from 5-99% by weight of one fraction, e.g. fraction A and the rest up to 100% of weight of another fraction e.g. a crude saponin fraction or fraction C. The weight is calculated as the total weight of the saponin fractions.

[0084] In another embodiment, the ISCOM matrix or ISCOM complex comprises from 40% to 99% by weight of one fraction, e.g. fraction A and from 1% to 60% by weight of another fraction, e.g. a crude saponin fraction or fraction C. The weight is calculated as the total weight of the saponin fractions.

[0085] In yet another embodiment, the ISCOM matrix or ISCOM complex comprises from 70% to 95% by weight of one fraction e.g., fraction A, and from 30% to 5% by weight of another fraction, e.g., a crude saponin fraction, or fraction C. The weight is calculated as the total weight of the saponin fractions. In other embodiments, the saponin fraction from Quillaja saponaria Molina is selected from any one of QA 1-21.

[0086] In addition to particles containing mixtures of saponin fractions, ISCOM matrix particles and ISCOM complex particles may each be formed using only one saponin fraction. Compositions disclosed herein may contain multiple particles wherein each particle contains only one saponin fraction. That is, certain compositions may contain one or more different types of ISCOM-matrix complexes particles and/or one or more different types of ISCOM complexes particles, where each individual particle contains one saponin fraction from Quillaja saponaria Molina, wherein the saponin fraction in one complex is different from the saponin fraction in the other complex particles.

[0087] In particular aspects, one type of saponin fraction or a crude saponin fraction may be integrated into one ISCOM matrix complex or particle and another type of substantially pure saponin fraction, or a crude saponin fraction, may be integrated into another ISCOM matrix complex or particle. A composition or vaccine may comprise at least two types of complexes or particles each type having one type of saponins integrated into physically different particles.

[0088] In the compositions, mixtures of ISCOM matrix complex particles and/or ISCOM complex particles may be used in which one saponin fraction Quillaja saponaria Molina and another saponin fraction Quillaja saponaria Molina are separately incorporated into different ISCOM matrix complex particles and/or ISCOM complex particles.

[0089] The ISCOM matrix or ISCOM complex particles, which each have one saponin fraction, may be present in composition at any combination of weight %. In particular aspects, a composition may contain 0.1% to 99.9% by weight, 5% to 95% by weight, 10% to 90% by weight, 15% to 85% by weight, 20% to 80% by weight, 25% to 75% by weight, 30% to 70% by weight, 35% to 65% by weight, 40% to 60% by weight, 45% to 55% by weight, 40 to 60% by weight, or 50% by weight, of an ISCOM matrix or complex containing a first saponin fraction with the remaining portion made up by an ISCOM matrix or complex containing a different saponin fraction. In aspects, the remaining portion is one or more ISCOM matrix or complexes where each matrix or complex particle contains only one saponin fraction. In other aspects, the ISCOM matrix or complex particles may contain more than one saponin fraction.

[0090] In particular compositions, the only saponin fraction in a first ISCOM matrix or ISCOM complex particle is Fraction A and the only saponin fraction in a second ISCOM matrix or ISCOM complex particle is Fraction C.

[0091] In embodiments, the Fraction A of Quillaja saponaria Molina accounts for at least about 80%, 81%, 82%, 83%, 84%, 85%, 86%, 87%, 88%, 89%, 90%, 91%, 92%, 93%, 94%, 95%, 96%, 97%, 98%, or 99% by weight, and fraction C of Quillaja saponaria Molina accounts for the remainder, respectively, of the sum of the weights of fraction A of Quillaja saponaria Molina and fraction C of Quillaja saponaria Molina in the adjuvant.

[0092] Preferred compositions comprise a first ISCOM matrix containing Fraction A and a second ISCOM matrix containing Fraction C, wherein the Fraction A ISCOM matrix constitutes about 70% per weight of the total saponin adjuvant, and the Fraction C ISCOM matrix constitutes about 30% per weight of the total saponin adjuvant. In another preferred composition, the Fraction A ISCOM matrix constitutes about 85% per weight of the total saponin adjuvant, and the Fraction C ISCOM matrix constitutes about 15% per weight of the total saponin adjuvant. In another preferred composition, the Fraction A ISCOM matrix constitutes about 92% per weight of the total saponin adjuvant, and the Fraction C ISCOM matrix constitutes about 8% per weight of the total saponin adjuvant. Thus, in certain compositions, the Fraction A ISCOM matrix is present in a range of about 70% to about 85%, and Fraction C ISCOM matrix is present in a range of about 15% to about 30%, of the total weight amount of saponin adjuvant in the composition. In certain compositions, the Fraction A ISCOM matrix is present in a range of about 70% to about 92%, and Fraction C ISCOM matrix is present in a range of about 8% to about 30%, of the total weight amount of saponin adjuvant in the composition. In embodiments, the Fraction A ISCOM matrix accounts for 50-96% by weight and Fraction C ISCOM matrix accounts for the remainder, respectively, of the sums of the weights of Fraction A ISCOM matrix and Fraction C ISCOM in the adjuvant. In a particularly preferred composition, referred to herein as MATRIX-M™, the Fraction A ISCOM matrix is present at about 85% and Fraction C ISCOM matrix is present at about 15% of the total weight amount of saponin adjuvant in the composition. MATRIX-M™ may be referred to interchangeably as Matrix-M1.

[0093] Exemplary QS-7 and QS-21 fractions, their production and their use is described in U.S. Pat. Nos. 5,057,540; 6,231,859; 6,352,697; 6,524,584; 6,846,489; 7,776,343, and 8,173,141, which are incorporated by reference herein.

[0094] In embodiments, other adjuvants may be used in addition or as an alternative. The inclusion of any adjuvant described in Vogel et al., “A Compendium of Vaccine Adjuvants and Excipients (2nd Edition),” herein incorporated by reference in its entirety for all purposes, is envisioned within the scope of this disclosure. Other adjuvants include complete Freund's adjuvant (a non-specific stimulator of the immune response containing killed Mycobacterium tuberculosis), incomplete Freund's adjuvants and aluminum hydroxide adjuvant. Other adjuvants comprise GMCSP, BCG, MDP compounds, such as thur-MDP and nor-MDP, CGP (MTP-PE), lipid A, and monophosphoryl lipid A (MPL), MF-59, RIBI, which contains three components extracted from bacteria, MPL, trehalose dimycolate (TDM) and cell wall skeleton (CWS) in a 2% squalene/TWEEN® polysorbate 80 emulsion. In embodiments, the adjuvant may be a paucilamellar lipid vesicle; for example, NOVASOMES®. NOVASOMES® are paucilamellar nonphospholipid vesicles ranging from about 100 nm to about 500 nm. They comprise BRIJ® alcohol ethoxylate 72, cholesterol, oleic acid and squalene. NOVASOMES® have been shown to be an effective adjuvant (see, U.S. Pat. Nos. 5,629,021, 6,387,373, and 4,911,928.

### Example 1: Assays to Measure Anti-rS Proteins IgG1, IgG2, IgG3, and IgG4, and Total Anti-rS IgG in Serum of Patients Administered COVID-19 Vaccines or Previously Infected with SARS-CoV-2

[0095] Purpose: The anti-rS proteins IgG1, IgG2, IgG3, and IgG4, and total anti-rS IgG assays were developed to measure the levels of anti-Spike IgG (% of Total anti-Spike IgG) in serum samples from subjects repeatedly immunized with COVID-19 vaccines. These assays allowed for the identification of different IgG subtypes to guide vaccine platform selection. Surrogate ADCP (FcγRIIa binding), surrogate ADCC (FcγRIIIa binding), and ADCD (C1q binding) were also measured.

[0096] Samples: Samples were collected: (1) from patients that received three doses of a first vaccine that contained mRNA encoding a SARS-CoV-2 Spike protein before and after the patients were administered a booster of a vaccine containing a SARS-CoV-2 Spike glycoprotein (referred to as “Heterologous 1”); (2) from patients that received three doses of a second vaccine that contained mRNA encoding a SARS-CoV-2 Spike protein before and after the patients were administered a booster of a vaccine containing a SARS-CoV-2 Spike glycoprotein (referred to as “Heterologous 2”); and (3) from patients that received two doses of a vaccine containing a SARS-CoV-2 Spike glycoprotein before and after the patients were administered a booster of the same vaccine (referred to as “Homologous”). The SARS-CoV-2 Spike glycoprotein of the vaccine from (3) and the booster of (1), (2), and (3) contains proline at positions 973 and 974 and an inactive primary furin cleavage site, wherein the SARS-CoV-2 S glycoprotein is numbered according to the polypeptide of SEQ ID NO: 2. The vaccine of (3) and the booster of (1), (2), and (3) further contains a saponin adjuvant. The saponin adjuvant contained two iscom particles, wherein: the first iscom particle comprises fraction A of Quillaja saponaria Molina and not fraction C of Quillaja saponaria Molina; and the second iscom particle comprises fraction C of Quillaja saponaria Molina and not fraction A of Quillaja saponaria Molina. Fraction A and Fraction C account for 85% and 15% by weight, respectively, of the sum of the weights of fraction A of Quillaja saponaria Molina and fraction C of Quillaja saponaria Molina in the adjuvant.

[0097] Each sample was subjected to an anti-Spike IgG4 assay (FIG. 2A), an anti-Spike IgG1 assay (FIG. 2B), and a total anti-Spike IgG assay (FIG. 2C), as described below and illustrated in FIGS. 2A-2C. The SARS-CoV-2 S glycoprotein utilized in the assay (also referred to as “SARS-CoV-2 rS protein”) contains proline at positions 973 and 974 and an inactive primary furin cleavage site, wherein the SARS-CoV-2 S glycoprotein is numbered according to the polypeptide of SEQ ID NO: 2.

[0098] Anti-Spike IgG4 assay: Assay plates (Thermo Fisher Scientific, Waltham, MA, USA) were coated with 1-2 μg/mL SARS-CoV-2 rS protein (produced at Novavax, Inc., Gaithersburg, MD, USA) for 15 to 72 hours at 2-8° C. Plates were then washed with phosphate-buffered saline with Tween 20 (PBST) and blocked for 1 hour with blocking buffer (Thermo Fisher Scientific). Human serum samples (reference standards, quality controls, or test sera) were then added to the wells, allowing anti-rS protein IgG antibodies to bind to rS protein coated on plate (2 hours of incubation). An anti-SARS-CoV-2 Spike RBD IgG4 monoclonal antibody (Acro Biosystems, Cat #SPD-M402a) was used as a reference standard to measure the IgG4 antibodies in serum samples. The plates were again washed with PBST, and then a mouse anti-human IgG4 secondary antibody conjugated with horseradish peroxidase (HRP; from Invitrogen) was added and incubated for 1 hour at room temperature. A final wash step was performed, followed by addition of 3,3′5,5′-tetramethylbenzidine substrate (TMB, from Thermo Fisher Scientific). The reaction was stopped after 20 minutes by TMB stop solution (Scytek Laboratories, Logan, UT, USA). The optical density (OD) of the chromogenic signal is directly proportional to the amount of anti-rS IgG4 captured on the plate, providing a quantifiable measurement of IgG4 concentration in the serum sample. Anti-Spike IgG4 concentration was calculated by interpolating to the levels of the IgG4 reference standard curve.

[0099] Anti-Spike IgG1 assay: Assay plates (Thermo Fisher Scientific, Waltham, MA, USA) were coated with 1-2 μg/mL SARS-CoV-2 rS protein (produced at Novavax, Inc., Gaithersburg, MD, USA) for 15 to 72 hours at 2-8° C. Plates were then washed with phosphate-buffered saline with Tween 20 (PBST) and blocked for 1 hour with blocking buffer (Thermo Fisher Scientific). Human serum samples (reference standards, quality controls, or test sera) were then added to the wells, allowing anti-rS protein IgG antibodies to bind to S protein coated on plate (2 hours of incubation). An anti-SARS-CoV-2 Spike RBD IgG1 monoclonal antibody (Acro Biosystems, Cat #SPD-M265) was used as a reference standard. The plates were again washed with PBST, and then a mouse anti-human IgG1 secondary antibody conjugated with horseradish peroxidase (HRP; from Sino Biological) was added and incubated for 1 hour at room temperature. A final wash step was performed, followed by addition of 3,3′5,5′-tetramethylbenzidine substrate (TMB, from Thermo Fisher Scientific). The reaction was stopped after 25 minutes by TMB stop solution (Scytek Laboratories, Logan, UT, USA). The optical density (OD) of the chromogenic signal is directly proportional to the amount of anti-rS IgG1 captured on the plate, providing a quantifiable measurement of IgG1 concentration in the serum sample. Anti-Spike IgG1 concentration was calculated by interpolating to the levels of the IgG1 reference standard curve.

[0100] Anti-Spike IgG2 assay: Assay plates (Thermo Fisher Scientific, Waltham, MA, USA) were coated with 1-2 μg/mL SARS-CoV-2 rS protein (produced at Novavax, Inc., Gaithersburg, MD, USA) for 15 to 72 hours at 2-8° C. Plates were then washed with phosphate-buffered saline with Tween 20 (PBST) and blocked for 1 hour with blocking buffer (Thermo Fisher Scientific). Human serum samples (reference standards, quality controls, or test sera) were then added to the wells, allowing anti-rS protein IgG antibodies to bind to S protein coated on plate (2 hours of incubation). An anti-SARS-CoV-2 Spike RBD IgG1 monoclonal antibody (Acro Biosystems, Cat #SPD-M265) was used as a reference standard. The plates were again washed with PBST, and then a mouse anti-human IgG2 secondary antibody conjugated with horseradish peroxidase (HRP; from Sino Biological) was added and incubated for 1 hour at room temperature. A final wash step was performed, followed by addition of 3,3′5,5′-tetramethylbenzidine substrate (TMB, from Thermo Fisher Scientific). The reaction was stopped after 25 minutes by TMB stop solution (Scytek Laboratories, Logan, UT, USA). The optical density (OD) of the chromogenic signal is directly proportional to the amount of anti-rS IgG2 captured on the plate, providing a quantifiable measurement of IgG2 concentration in the serum sample. Anti-Spike IgG2 concentration was calculated by interpolating to the levels of the IgG2 reference standard curve.

[0101] Anti-Spike IgG3 assay: Assay plates (Thermo Fisher Scientific, Waltham, MA, USA) were coated with 1-2 μg/mL SARS-CoV-2 rS protein (produced at Novavax, Inc., Gaithersburg, MD, USA) for 15 to 72 hours at 2-8° C. Plates were then washed with phosphate-buffered saline with Tween 20 (PBST) and blocked for 1 hour with blocking buffer (Thermo Fisher Scientific). Human serum samples (reference standards, quality controls, or test sera) were then added to the wells, allowing anti-rS protein IgG antibodies to bind to S protein coated on plate (2 hours of incubation). An anti-SARS-CoV-2 Spike RBD IgG3 monoclonal antibody (Acro Biosystems, Cat #SPD-M265) was used as a reference standard. The plates were again washed with PBST, and then a mouse anti-human IgG3 secondary antibody conjugated with horseradish peroxidase (HRP; from Sino Biological) was added and incubated for 1 hour at room temperature. A final wash step was performed, followed by addition of 3,3′5,5′-tetramethylbenzidine substrate (TMB, from Thermo Fisher Scientific). The reaction was stopped after 25 minutes by TMB stop solution (Scytek Laboratories, Logan, UT, USA). The optical density (OD) of the chromogenic signal is directly proportional to the amount of anti-rS IgG2 captured on the plate, providing a quantifiable measurement of IgG3 concentration in the serum sample. Anti-Spike IgG3 concentration was calculated by interpolating to the levels of the IgG3 reference standard curve.

[0102] Total Anti-Spike IgG assay: Assay plates (Thermo Fisher Scientific, Waltham, MA, USA) were coated with 1-2 μg/mL SARS-CoV-2 rS protein (produced at Novavax, Inc., Gaithersburg, MD, USA) for 15 to 72 hours at 2-8° C. Plates were then washed with phosphate-buffered saline with Tween 20 (PBST) and blocked for 1 hour with blocking buffer (Thermo Fisher Scientific). Human serum samples (reference standards, quality controls, or test sera) were then added to the wells, allowing anti-rS protein IgG antibodies to bind to S protein coated on plate (2 hours of incubation). An anti-SARS-CoV-2 Spike RBD IgG monoclonal antibody (Acro Biosystems, Cat #RAS008-02) was used as a reference standard. The plates were again washed with PBST, and then a goat anti-human IgG secondary antibody conjugated with horseradish peroxidase (HRP; from Southern Biotech, Birmingham, AL, USA) was added and incubated for 1 hour at room temperature. A final wash step was performed, followed by addition of 3,3′5,5′-tetramethylbenzidine substrate (TMB, from Thermo Fisher Scientific). The reaction was stopped after 20 minutes by TMB stop solution (Scytek Laboratories, Logan, UT, USA). The optical density (OD) of the chromogenic signal is directly proportional to the amount of Total anti-rS IgG captured on the plate, providing a quantifiable measurement of Total IgG concentration in the serum sample. Total anti-Spike IgG concentration was calculated by interpolating to the levels of the IgG reference standard curve.

[0103] Calculation of % IgG4: Data for anti-Spike IgG4, IgG1 and total IgG for individual subjects were tabulated. Anti-Spike IgG4(%) were calculated by anti-Spike IgG4/Total anti-spike IgG*100 for each subject. Anti-Spike IgG1(%) were calculated by anti-Spike IgG1/Total anti-spike IgG*100 for each subject.

[0104] Results: FIG. 3 shows the % of IgG1 out total IgG in the samples at day 1 (before boost) and at day 29 (28 days after boost). FIG. 4 shows the % of IgG4 out total IgG in the samples at day 1 (before boost) and at day 29 (28 days after boost). FIG. 5 shows the % of IgG4 out total IgG in the samples at day 29 (28 days after boost). FIG. 6 shows the % of IgG1 and IgG4 in the samples at day 1 (before boost). FIG. 7 shows the % of IgG1 and IgG4 in the samples at day 29 (28 days after boost). FIG. 8 shows the total anti-S glycoprotein IgG in the samples. FIG. 9 shows the total anti-S glycoprotein IgG1 in the samples. FIG. 10 shows the total anti-S glycoprotein IgG4 in the samples.

[0105] Table A shows the % of IgG4 out of total IgG in each sample on day 1 (D1 in the table) and day 29 (D29 in the table). Table B shows the % of IgG1 out of total IgG in each sample on day 1 (D1 in the table) and day 29 (D29 in the table). Table C shows the total anti-S IgG concentration in each sample on day 1 (D1 in the table) and day 29 (D29 in the table). Table D shows the total anti-S IgG1 concentration in each sample on day 1 (D1 in the table) and day 29 (D29 in the table). Table E shows the total anti-S IgG concentration in each sample on day 1 (D1 in the table) and day 29 (D29 in the table).

TABLE A

| | Heterologous | Heterologous | Heterologous | Heterologous | Homologous | Homologous |
|---|---|---|---|---|---|---|
| | 1 D1 | 1 D29 | 2 D1 | 2 D29 | D1 | D29 |
| n | 10 | 10 | 10 | 10 | 6 | 6 |
| Geometric | 18.7 | 24.1 | 7.3 | 9.5 | 0.04 | 0.03 |
| mean | | | | | | |
| Lower | 5.0 | 6.8 | 2.2 | 3.0 | 0.02 | 0.01 |
| 95% CI | | | | | | |
| Upper | 70.4 | 84.6 | 24.3 | 29.4 | 0.08 | 0.12 |
| 95% CI | | | | | | |

TABLE B

| | Heterologous | Heterologous | Heterologous | Heterologous | Homologous | Homologous |
|---|---|---|---|---|---|---|
| | 1 D1 | 1 D29 | 2 D1 | 2 D29 | D1 | D29 |
| n | 10 | 10 | 10 | 10 | 7 | 7 |
| Geometric | 27.6 | 26.6 | 43.9 | 40.8 | 52.8 | 46.9 |
| mean | | | | | | |
| Lower | 18.1 | 17.2 | 34.6 | 29.3 | 48.4 | 38.4 |
| 95% CI | | | | | | |
| Upper | 42.2 | 41.1 | 55.7 | 56.8 | 57.6 | 57.2 |
| 95% CI | | | | | | |

TABLE C

| | Heterologous | Heterologous | Heterologous | Heterologous | Homologous | Homologous |
|---|---|---|---|---|---|---|
| | 1 D1 | 1 D29 | 2 D1 | 2 D29 | D1 | D29 |
| n | 10 | 10 | 10 | 10 | 7 | 7 |
| Geometric | 33,754 | 71,118 | 21,049 | 61,879 | 25,811 | 164,848 |
| mean | | | | | | |
| Lower | 18,832 | 51,221 | 10,539 | 43,299 | 8,726 | 127,979 |
| 95% CI | | | | | | |
| Upper | 60,500 | 98,744 | 42,040 | 88,432 | 76,346 | 212,340 |
| 95% CI | | | | | | |

TABLE D

| | Heterologous | Heterologous | Heterologous | Heterologous | Homologous | Homologous |
|---|---|---|---|---|---|---|
| | 1 D1 | 1 D29 | 2 D1 | 2 D29 | D1 | D29 |
| n | 10 | 10 | 10 | 10 | 7 | 7 |
| Geometric | 9,331 | 18,928 | 9,236 | 25,256 | 13,630 | 77,343 |
| mean | | | | | | |
| Lower | 5,157 | 11,910 | 4,033 | 14,530 | 4,619 | 55,184 |
| 95% CI | | | | | | |
| Upper | 16,883 | 30,082 | 21,155 | 43,898 | 40,219 | 108,400 |
| 95% CI | | | | | | |

TABLE E

| | Heterologous | Heterologous | Heterologous | Heterologous | Homologous | Homologous |
|---|---|---|---|---|---|---|
| | 1 D1 | 1 D29 | 2 D1 | 2 D29 | D1 | D29 |
| n | 10 | 10 | 10 | 10 | 7 | 7 |
| Geometric | 9,331 | 18,928 | 9,236 | 25,256 | 13,630 | 77,343 |
| mean | | | | | | |
| Lower | 5,157 | 11,910 | 4,033 | 14,530 | 4,619 | 55,184 |
| 95% CI | | | | | | |
| Upper | 16,883 | 30,082 | 21,155 | 43,898 | 40,219 | 108,400 |
| 95% CI | | | | | | |

[0106] Total anti-S IgG and IgG1 levels following three homologous doses of mRNA or NVX-CoV2373 were similar, although NVX-CoV2373 induced somewhat higher levels, and the fourth dose of NVX-CoV2373 led to increased responses in each group (FIG. 19A). Compared with recipients of prior mRNA vaccine, anti-S IgG3 levels were markedly higher (>10-fold) after three or four homologous doses of NVX-CoV2373. By contrast, much higher anti-S IgG4 levels (>75-fold) were observed following repeated mRNA vaccination, but not after three or four homologous doses of NVX-CoV2373 (FIG. 19A). The fourth dose of NVX-CoV2373 also appeared to enhance surrogate signals for ADCP, ADCC, and ADCD activities in recipients of prior mRNA vaccine, though the effect was greater after a fourth homologous dose of NVX-CoV2373 (FIG. 19B).

[0107] The data that the NVX-CoV2373 rS protein vaccine does not appear to induce notable increases in IgG4, even after multiple exposures, or to impair Fc-dependent effector responses as observed with mRNA vaccines. Instead, NVX-CoV2373 drove proportional increases in IgG3, perhaps the most potent SARS-CoV-2 neutralizing antibody subclass, and enhanced surrogate ADCP, ADCD, and ADCC activity.

[0108] The data shows the ability of the assays to detect IgG4 class switch in samples of patients that received COVID-19 vaccines. Specifically, the data shows that there is significantly lower IgG4 in serum samples from patients that received vaccines containing SARS-CoV-2 S glycoproteins than in serum samples from patients that received vaccines containing mRNA encoding a SARS-CoV-2 S glycoprotein.

### Example 2: Assays to Measure Anti-rS Proteins IgG in Serum Against SARS-CoV-2 Ancestral and Variant Strain rS Proteins

[0109] Purpose: The anti-rS proteins I IgG assays were developed to quantify vaccine response and establish correlation of such responses with protection against SARS-CoV-2 variant strains. The assay was assessed for precision, specificity, linearity, and other validation parameters, as well as correlation with pseudovirus neutralization, wild-type virus neutralization, and hACE2 binding inhibition assay results.

[0110] Samples: Healthy human serum samples from before the COVID-19 pandemic (collected in 2016 through 2018) were obtained from BioIVT (Westbury, NY, USA) and Valley Biomedical (Winchester, VA, USA). COVID-19 convalescent serum was obtained from Sanguine BioSciences (Waltham, MA, USA) and BioIVT. Serum samples obtained from the Novavax clinical trial repository were from participants in phase 1 to 3 trials of the COVID-19 vaccine NVX-CoV2373 (Novavax, Gaithersburg, MD, USA). Positive quality control (QC) samples (COVID-19 convalescent serum pools) known to have high or low anti-rS IgG levels were used. Negative controls (NC) were pre-COVID-19 sera negative for anti-rS IgG. QC samples were tested in duplicate wells on the first plate of each run. For correlation analyses, serum samples were from the Novavax clinical trial 2019nCoV-311 (NCT05372588). For analysis of conversion to WHO international units, the following samples were used: high QC (HQC)/low QC (LQC)/NC samples (as described above), an in-house reference standard COVID-19 convalescent serum pool, WHO international standard (NIBSC code 20/136) [10,11], and the WHO reference panel (NIBSC code 20/268). The reference panel contains 5 different pooled samples, ranging from high to low and negative antibody titers.

[0111] Assay Procedure: Each sample was subjected to an anti-Spike IgG4 assay (FIG. 1). Assay plates (Thermo Fisher Scientific, Waltham, MA, USA) were coated with 0.80 μg/mL SARS-CoV-2 rS protein (produced at Novavax, Inc., Gaithersburg, MD, USA) for 15 to 72 h at 2-8° C. For assay development and initial validation, Novavax's SARS-CoV-2 rS protein was prepared from the full-length (1273 amino acid), wild-type ancestral SARS-CoV-2 S protein based on Genbank gene sequence MN908947, nucleotides 21563-25384. A stable pre-fusion protein was produced by mutating the furin cleavage site and two residues in the CH domain. The recombinant protein was expressed in Sf9 insect cells and chromatographically purified to yield homotrimers displaying the N-terminal domain and receptor binding domain on the apical surface, as previously shown [9]. Coated plates were then washed with phosphate-buffered saline with Tween 20 (PBST) and blocked for 1 h with a blocking buffer (Thermo Fisher Scientific, Cat #37542). Human serum samples (reference standards, quality controls, or test sera) were then added to the wells, allowing anti-rS protein IgG antibodies to bind (2 h of incubation). The plates were again washed with PBST, and then a goat anti-human IgG secondary antibody conjugated with horseradish peroxidase (HRP) (SouthernBiotech, Cat #2040-05) was added and incubated for 1 h at room temperature. A final wash step was performed, followed by the addition of 3,305,50-tetramethylbenzidine substrate (TMB, Sigma, Cat #T00440-1L). The reaction was stopped after 10 min by TMB stop solution (Scytek Laboratories, Cat #TSB999). The optical density (OD) of the chromogenic signal is directly proportional to the amount of anti-rS IgG captured on the plate, providing a quantifiable measurement of rS-specific IgG concentration in the serum sample.

[0112] Validation Assays (Precision): Twenty-seven samples were tested twice per assay run (in duplicate) in 6 different assay runs performed by 3 different analysts on 2 different days. The geometric mean concentration (GMC) was calculated for each sample from the 6 runs. Precision was then estimated by calculating the percent geometric coefficient of variation (% GCV), based on the variance component analysis using analyst and day as random effects and the samples as a fixed effect. The acceptance criteria for precision were that at least 80% of samples should have a % GCV<20%, while samples with IgG concentrations at or near the lower limit of quantitation (LLoQ) were permitted to have a % GCV<25%.

[0113] Validation Assays (Selectivity): Forty samples collected before the COVID-19 pandemic (which are thus expected to be negative for SARS-CoV-2-specific antibodies) were tested in the IgG assay. These samples were expected to have concentrations below LLoQ.

[0114] Validation Assays (Specificity): To confirm the specific detection of anti-rS IgG, homologous antigen competition was assessed by incubating anti-rS IgG-positive samples with different amounts of SARS-CoV-2 rS for 1 h at room temperature before testing. Controls were samples incubated with assay buffer only. The acceptance criterion was that homologous protein incubation should reduce the detected IgG concentration by at least 50% in at least 80% of the samples tested. To assess the potential for cross-reactivity with other betacoronavirus S proteins, samples were incubated with S protein from SARS-CoV-1 and MERS-CoV. Samples were also incubated with irrelevant proteins-respiratory syncytial virus fusion protein (RSV F) at 4_g/mL and influenza virus hemagglutinin (HA) (A/Kansas/14/2017 virus like particles [VLP]) at 4 HA units. These related and irrelevant viral proteins were, like SARS-CoV-2 rS, expressed in Sf9 insect cells and purified by generally parallel chromatographic methods. The targeted result was that incubation with irrelevant protein should not reduce the detected IgG concentration (_20% reduction) in at least 80% of the samples tested. Additionally, pre-COVID-19 samples from 5 participants vaccinated against RSV (Novavax clinical trial RSV-M-301, NCT02624947) and 5 participants vaccinated against influenza (Novavax clinical trial qNIV-E-301, NCT04120194) were tested in the anti-rS IgG assay (both pre- and post-vaccination samples). The targeted results were that vaccination against RSV or influenza using antigens produced in the same vaccine platform would not cause changes in detectable anti-rS IgG and that levels of anti-rS IgG should be low in the post-immunization samples despite vigorous responses to other highly immunogenic respiratory viral proteins. For all specificity outcomes, the percent reduction in IgG concentration (% inhibition) was calculated as follows:

$$\% Inhibition = [ 100 - \frac{Results with protein incubation}{Results without protein incubation} \times 100 ]$$

[0115] Validation Assays (Matrix Effects): To assess the impact of hemolysis on the assay, 100% hemolyzed human blood (BioIVT BRH1369895) was spiked into 6 samples, and negative control to produce 50% hemolyzed or 25% hemolyzed samples (to represent severe hemolysis). After being tested in the IgG assay, percent recovery was calculated (result for the hemolyzed sample divided by the result from the non-hemolyzed sample). The acceptance criteria were a percent recovery between 80 and 120% of the reference value and that the NC should remain <LLoQ. The same process was used to assess the impact of lipemia, with high lipemic serum with a high level of triglycerides (BioIVT BRH1119533, triglycerides 1473 mg/dL) being spiked into samples. The final triglyceride concentrations were 500 or 250 mg/dL (normal level, <150 mg/dL). The samples were then used in the IgG assay, and percent recovery was calculated. The acceptable range was recovery between 80 and 120% of the reference value, with the NCs below LLoQ.

[0116] Validation Assays (Linearity): Two phase 1 trial samples with high anti-rS IgG levels were tested in the assay undiluted and in a 1:2 dilution series (6 assay runs). Precision was calculated for each dilution point, and linear regression was performed for observed versus expected GMC. The expected EU/mL at each dilution was calculated from the overall GMC from all runs of the least diluted divided by the dilution factor for each dilution of each sample. The observed anti-rS protein IgG EU/mL at each dilution is the overall GMC at each dilution for each sample in all runs. To assess the ability of the assay to return values that accurately reflect the neat sample, the % relative bias at each dilution point was calculated as follows:

$$\% Relative Bias = 100 \times \frac{Observed overall anti rS IgG GMC - Expected anti rS IgG GMC}{Expected anti - rS IgG GMC}$$

[0117] Validation Assays (Sensitivity): The lowest IgG level values that were accurately and precisely determined (as above) were assessed for the 2 linearity assessment samples in the linearity analysis. The LLoQ for the assay was set at 200 EU/mL during assay qualification and was confirmed during validation.

[0118] Validation Assays (Assay Robustness (Incubation Time and Plate Coating Time)): Incubation time robustness—The assay was conducted on 18 samples using lower and upper time limits for each incubation step as follows: plate coating time (15 and 72 h, lower and upper time limit, respectively), plate blocking time (60 min and 90 min), sample incubation on plate (110 min and 130 min), secondary antibody HRP on the plate (50 min and 70 min), TMB incubation on plate (8 min and 12 min). Assay results were then compared with the precision analysis runs performed under reference conditions. The acceptance criteria were that >80% of samples should have values within 80-120% of reference values. Percent recovery was calculated as follows:

$$\% Recovery = 100 \times \frac{Test condition value}{Reference condition value}$$

[0119] Validation Assays (Sample Stability): Samples were stored at various temperatures: 6, 24, or 48 h at room temperature, 6 or 7 days at 2-8° C., 29 days at −20±10° C., 6 or 24 months at −80±10° C. Samples were then tested in the assay, and the results were compared with the reference condition results from the precision analysis assay runs. Samples were also tested after 3, 6, 7, or 8 freeze/thaw cycles (1 h at room temperature followed by refreezing), and results were compared to the precision run results (only 1 freeze/thaw cycle). Percent recovery was calculated as shown above, with acceptable recovery between 80-120% of reference.

[0120] Validation Assays: The assay was also adapted for Beta, Delta, Omicron BA.1, Omicron BA.5, and Omicron XBB.1.5 variants. The assay method described in FIG. 1 is the same except the ancestral S protein used to coat the plate was replaced by the relevant variant sequence protein. A similar validation process as described in FIG. 1 was followed.

[0121] Correlation Analyses: Each sample was assessed in the anti-rS IgG assay described here. The same samples were also tested in wild-type virus neutralization, pseudovirus neutralization, and hACE2 binding inhibition assays.

[0122] Results: The IgG assay is precise, robust, linear, and specific for SARS-CoV-2 S protein and is useful for both ancestral strain and variants (tested for Beta, Delta, and Omicron BA.1/BA.5/XBB.1.5). Results from the IgG assay correlated significantly with pseudovirus/live wild-type virus neutralization and hACE2 binding inhibition assays for all variants tested, ranging from the ancestral virus to XBB.1.5.

[0123] Inter-assay, intra-assay, and total precision were <20% GCV for all 27 serum samples representing all concentration ranges (low, medium, and high concentrations) are shown in FIG. 11. Assay plates (Thermo Fisher Scientific, Waltham, MA, USA) were coated with 0.80 μg/mL SARS-CoV-2 rS protein (produced at Novavax, Inc., Gaithersburg, MD, USA) for 15 to 72 h at 2-8° C.

[0124] Assay selectivity met acceptance criteria of 80% of samples having IgG levels below LLoQ. Of 40 serum samples collected before the COVID-19 pandemic (collected in 2016 through 2018), 35 had anti-rS IgG levels below LLoQ of 200 EU/mL (Table S1). Some of these samples were known to have high influenza hemagglutination inhibition assay titers (data not shown). Thus, the IgG assay is not affected by the presence of antibodies to other common respiratory pathogens.

[0125] Assay specificity also met the acceptance criteria. When 6 samples (from a phase 1 trial) were incubated with SARS-CoV-2 rS protein, IgG detection was strongly inhibited by >50% for all 6 samples, indicating that the assay is specific to SARS-CoV-2 rS protein (Table 2). When the same 6 samples were incubated with rS proteins of MERS-CoV and SARS-CoV-1, the phase 1 trial sera showed much less inhibition of the IgG signal, suggesting little crossreactivity with MERS-CoV and SARS-CoV-1 in the assay. We did not test cross-reactivity with HCoV-OC34 or HKU1 sequence spike proteins, but these proteins have significantly lower sequence homology with SARS-CoV-2 spike than SARS-CoV-1 and MERS-CoV and have been shown to produce only minimal levels of cross-reactivity (16). Here, the absence of signals significantly >LLoQ in pre-pandemic sera, despite the widespread seropositivity to the endemic seasonal coronaviruses, is consistent with minimal cross-reaction.

[0126] The same 6 samples were also incubated with irrelevant proteins produced on the same vaccine platform (RSV F protein or influenza virus-like particles [VLP]) are shown in FIG. 12. Among clinical trial samples, there was no significant inhibition (defined as >20%) of IgG detection by irrelevant proteins for 5 of 6 (83.6%) samples for RSV incubation and for 6 of 6 (100%) samples for influenza VLP. Additionally, among 5 participants vaccinated against RSV and 5 vaccinated against influenza, anti-rS IgG levels (using immunogens manufactured on the same insect cell platform) did not change in post-vaccination versus pre-vaccination samples (Table S2). One RSV-vaccinated individual showed a 2.26-fold increase in anti-rS IgG concurrent with immunization, but the increase was from a <LLoQ value to a value slightly above LLoQ. Free hemoglobin and lipemic matrix had minimal impact on the assay are shown in FIG. 13.

[0127] Linearity of the assay was demonstrated, with R2 values of 0.9998 for the 2 tested samples are shown in FIG. 14A and FIG. 14B. LLoQ was assigned at 200 EU/mL, based on the lowest concentration values that could be detected accurately and precisely in these two samples (and precision data [FIG. 11] on samples with anti-rS levels approximating 200 EU/mL supported this selection). Based on phase 1 samples, the upper limit of quantitation (ULoQ) was provisionally assigned as at least 206,767 EU/mL. However, based on 5 serum samples from phase 2 and phase 3 trials of the COVID vaccine NVX-CoV2373, the ULoQ is currently estimated to be at least 2,904,275 EU/mL.

[0128] The stability of samples was tested at different storage temperatures (room temperature, refrigeration [2-8° C.], and freezing [−20° C. or −80° C.]). Samples were also assessed after multiple freeze/thaw cycles are shown in FIG. 15. The samples were stable up to 8 freeze/thaw cycles and up to 2 years in −80° C. freezer storage, as shown by recovery within the acceptable recovery range of 80-120% of reference.

[0129] Results for the assay validation parameters for the Beta, Delta, and Omicron BA.1/BA.5/XBB.1.5 variants were similar to those for the ancestral strain. Quality control samples performed similarly well for variants compared to ancestral strain as shown in FIG. 16A. For the Beta variant, inter-assay, intra-assay, and total precision had <20% GCV for 18 of 20 (90%) samples. Selectivity was demonstrated, as 36 of 40 (90.0%) pre-COVID-19 samples showed <LLoQ results in the assay (FIG. 16B). Specificity was also demonstrated, with 8 of 8 samples showing >50% reduction in IgG detection when incubated with homologous S protein. SARS-CoV-1 and MERS-CoV S protein reduced IgG detection in 5 of 8 and in 3 of 8 samples, respectively. RSV F protein reduced IgG detection in 3 of 8 samples; influenza hemagglutinin did not reduce IgG detection in any samples. Among 5 participants vaccinated against RSV and 5 vaccinated against influenza, none of the post-vaccination samples showed changes in anti-rS IgG detection compared with pre-vaccination. Linearity was successfully demonstrated (R2=0.9999 and 0.9996), with LLoQ defined as 200 EU/mL and ULoQ determined to be at least 490,731 EU/mL. For the Delta variant, 19 of 20 (95%) samples had inter-assay, intra-assay, and total precision % GCV <20%. Of 40 pre-COVID-19 serum samples, 33 (82.5%) showed <LLoQ results in the assay. Of 7 samples, 6, 3, and 7 samples showed >50% reduction in IgG detection when incubated with homologous S proteins (ancestral, Beta, and Delta, respectively) (FIG. 16C). SARS-CoV-1 and MERS-CoV S protein reduced IgG detection in 2 of 7 and in 1 of 8 samples, respectively. RSV F protein did not reduce IgG detection in any samples; influenza hemagglutinin reduced IgG detection in 1 of 7 samples. Among 5 participants vaccinated against influenza, none of the post-vaccination samples had changes in anti-rS IgG compared with pre-vaccination. Of the 5 participants vaccinated against RSV, only 1 showed changes in anti-rS IgG levels. Linearity was successfully demonstrated (R2=0.9999 and 0.9998), LLoQ was defined as 200 EU/mL, and ULoQ was determined to be at least 501,789 EU/mL. For Omicron BA.1, inter-assay, intra-assay, and total precision had <20% GCV for 20 of 21 (95.2%) samples. Of 40 pre-COVID-19 serum samples, 31 (77.5%) showed <LLoQ results. Of 8 samples, 7 to 8 samples showed >50% reduction in IgG detection when incubated with homologous S protein. RSV F protein did not reduce IgG detection in 6 of 8 (75%) samples (FIG. 16D). Influenza hemagglutinin did not reduce IgG detection in 7 of 8 (87.5%) samples. Among 5 participants vaccinated against influenza, none of the post-vaccination samples had changes in anti-rS IgG compared with pre-vaccination. Of the 5 participants vaccinated against RSV, only 1 showed changes in anti-rS IgG levels. Linearity was successfully demonstrated (R2=0.986 and 0.966), LLoQ was defined as 200 EU/mL, and ULoQ was determined to be at least 391,124 EU/mL. Robustness for plate coating time was demonstrated, as 17 of 21 samples (81.0%) had recovery within 80-120% of the baseline values. For Omicron BA.5, all 21 samples had inter-assay, intra-assay, and total precision % GCV <20%. Of 40 pre-COVID-19 serum samples, 34 (85%) showed <LLoQ results. Of 8 samples, 6 to 8 samples showed >50% reduction in IgG detection when incubated with SARS-CoV-2 S protein (7/8 for Omicron BA.5, 6-7/8 for Omicron BA.1, 6/8 for ancestral strain) (FIG. 16E). RSV F protein did not reduce IgG detection in 7 of 8 (87.5%) samples; Ebola glycoprotein did not reduce IgG detection in any samples. Linearity was successfully demonstrated (R2=0.9988 and 0.9991). LLoQ was defined as 200 EU/mL, and ULoQ was determined to be at least 990,591 EU/mL. Robustness for plate coating time was demonstrated, as 17 of the 21 samples (81.0%) were within 80-120% of the baseline values. For Omicron XBB.1.5, all 21 serum samples had inter-assay, intra-assay, and total precision % GCV <20%. Of 40 pre-COVID-19 samples, 33 (82.5%) showed <LLoQ results. Of 8 samples tested, all samples showed a >50% reduction in IgG detection when incubated with SARS-CoV-2 S protein (ancestral strain, Omicron XBB.1.5, or Omicron BA.5) (FIG. 16F). Incubation with RSV F protein did not reduce IgG detection in 7 of 8 (87.5%) samples, and Ebola glycoprotein incubation did not reduce IgG detection in any of the 8 samples. Linearity was successfully demonstrated (R2=0.9985 and 0.9991). LLoQ was defined as 200 EU/mL, and ULoQ was determined to be at least 682,680 EU/mL. Robustness for plate coating time was demonstrated, as all 21 tested samples had recovery within 80-120% of the baseline values.

[0130] Natural SARS-CoV-2 infection also induces anti-rS IgG as part of the body's immune response. Levels of anti-rS IgG in the serum from both seropositive and seronegative subjects were evaluated using the anti-rS IgG assays for ancestral, Omicron BA.1, and Omicron BA.5 strains, followed by correlation with the neutralizing antibody levels (either live virus-based microneutralization assays or pseudovirus-based neutralization assays) and the hACE2 binding inhibition assay. For seronegative samples, the IgG assay ancestral strain results correlated significantly with results from the live wild-type virus neutralization assay (R2=0.73, Pearson's r=0.853, p<0.0001) (FIG. 17A), hACE2 binding inhibition assay (R2=0.874, Pearson's r=0.935, p<0.0001) (FIG. 17B), and pseudovirus-based neutralization assay (R2=0.857, Pearson's r=0.926, p<0.0001) (FIG. 17C). IgG assay Omicron BA.1 results correlated significantly with results from the live wild-type virus neutralization assay (R2=0.48, Pearson's r=0.695, p<0.0001) (FIG. 17D). IgG assay Omicron BA5 results correlated significantly with results from the hACE2 binding inhibition assay (R2=0.825, Pearson's r=0.906, p<0.0001) (FIG. 17E) and pseudovirus-based neutralization assay (R2=0.659, Pearson's r=0.812, p<0.0001) (FIG. 17F). Similarly, for seropositive samples, the IgG assay ancestral strain results correlated significantly with results from the live wild-type virus neutralization assay (R2=0.56, Pearson's r=0.746, p<0.0001) (FIG. 18A), hACE2 binding inhibition assay (R2=0.769, Pearson's r=0.877, p<0.0001) (FIG. 18B), and pseudovirus-based neutralization assay (R2=0.768, Pearson's r=0.876, p<0.0001) (FIG. 18C). IgG assay Omicron BA.1 results correlated significantly with results from the live wild-type virus neutralization assay (R2=0.60, Pearson's r=0.778, p<0.0001) (FIG. 18D). IgG assay Omicron BA5 results correlated significantly with results from the hACE2 binding inhibition assay (R2=0.741, Pearson's r=0.861, p<0.0001) (FIG. 18E) and pseudovirus-based neutralization assay (R2=0.686, Pearson's r=0.828, p<0.0001) (FIG. 18F).

[0131] Various modifications, equivalent processes, as well as numerous methods to which the present invention may be applicable will be readily apparent to those of skill in the art to which the present invention is directed upon review of the present specification. The claims are intended to cover such modifications and methods.

[0132] As noted above, the present invention is applicable to the identification of whether a biological sample contains antibodies against SARS-CoV-2 S glycoproteins. Accordingly, the present invention should not be considered limited of the particular examples described above, but rather should be understood to cover all aspects of the invention as set out in the attached claims.

### Enumerated Embodiments of the Disclosure

[0133] Specific enumerated embodiments <1> to <20> provided below are for illustration purposes only, and do not otherwise limit the scope of the disclosed subject matter, as defined by the claims. These enumerated embodiments encompass all combinations, sub-combinations, and multiply referenced (e.g., multiply dependent) combinations described therein.

1. A method for determining if a biological sample contains antibodies that bind to the SARS-CoV-2 Spike (S) glycoprotein, comprising:
[0134] (i) providing a surface coated with a SARS-CoV-2 S glycoprotein;
[0135] (ii) exposing the surface to the biological sample;
[0136] (iii) exposing the surface to a secondary antibody; and
[0137] (iv) detecting the secondary antibody that is bound to the surface;
   wherein the biological sample contains antibodies that bind to the SARS-CoV-2 S glycoprotein if the secondary antibody is detected.
   2. The method of enumerated embodiment 1, wherein the SARS-CoV-2 S glycoprotein has at least 80%, at least 81%, at least 82%, at least 83%, at least 84%, at least 85%, at least 86%, at least 87%, at least 88%, at least 89%, at least 90%, at least 91%, at least 92%, at least 93%, at least 94%, at least 95%, at least 96%, at least 97%, at least 98%, at least 99%, or 100% identity to a polypeptide of any one of SEQ ID NOS: 2, 4, 38, 41, 44, 48, 51, 54, 58, 61, 63, 65, 67, 73, 75, 78, 79, 82, 83, 85, 106, 108, 89, and 110, 112-115, 132, 133, 114, 138, 141, 144, 147, 151, 153, 156, 158, 174, 175, 176, 181-184, 186, 188, 190, 195, 217-228, 233-236, 243, 255-264, 273-280, 283, 284, 287, 288, 291, 292, and 294, 296, 298, 300, 302, 304, 306, 308, 310, 312, 314, 316, 318, 320, 322, 324, 236, 328, 329, 330, 331, 332 and 333.
   3. The method of any one of enumerated embodiments 1-2, wherein the SARS-CoV-2 S glycoprotein has an inactive furin cleavage site.
   4. The method of enumerated embodiment 3, wherein the SARS-CoV-2 S glycoprotein has an inactive furin cleavage site having the amino acid sequence of QQAQ (SEQ ID NO: 7).
   5. The method of any one of enumerated embodiments 1-4, wherein amino acids 973 and 974 of the SARS-CoV-2 S glycoprotein are proline, as compared to a wild-type SARS-CoV-2 S glycoprotein having the amino acid sequence of SEQ ID NO: 2.
   6. The method of any one of enumerated embodiments 1-5, wherein the antibodies that bind to the SARS-CoV-2 S glycoprotein are IgG1.
   7. The method of any one of enumerated embodiments 1-5, wherein the antibodies that bind to the SARS-CoV-2 S glycoprotein are IgG2.
   8. The method of any one of enumerated embodiments 1-5, wherein the antibodies that bind to the SARS-CoV-2 S glycoprotein are IgG3.
   9. The method of any one of enumerated embodiments 1-5, wherein the antibodies that bind to the SARS-CoV-2 S glycoprotein are IgG4.
   10. The method of any one of enumerated embodiments 1-5, wherein the secondary antibody is selected from the group consisting of an anti-human IgG antibody, an anti-human IgG1 antibody, an anti-human IgG2 antibody, an anti-human IgG3 antibody and an anti-human IgG4 antibody.
   11. The method of any one of enumerated embodiments 1-10, wherein the SARS-CoV-2 S glycoprotein is selected from a SARS-CoV-2 virus or a variant of SARS-CoV-2 or a subvariant of a variant of SARS-CoV-2.
   12. The method of enumerated embodiment 11, wherein the variant of SARS-CoV-2 is a B.1.1.7 SARS-CoV-2 strain; a B.1.351 SARS-CoV-2 strain; a P.1 SARS-CoV-2 strain; a Cal.20C SARS-CoV-2 strain; a B.1.617.2 SARS-CoV-2 strain; a B.1.525 SARS-CoV-2 strain; a B.1.526 SARS-CoV-2 strain; a B.1.617.1 SARS-CoV-2 strain; a C.37 SARS-CoV-2 strain; a B.1.621 SARS-CoV-2 strain; or a B.1.1.529 SARS-CoV-2 strain.
   13. The method of enumerated embodiment 11, wherein the variant of SARS-CoV-2 is a subvariant of a B.1.1.7 SARS-CoV-2 strain; a B.1.351 SARS-CoV-2 strain; a P.1 SARS-CoV-2 strain; a Cal.20C SARS-CoV-2 strain; a B.1.617.2 SARS-CoV-2 strain; a B.1.525 SARS-CoV-2 strain; a B.1.526 SARS-CoV-2 strain; a B.1.617.1 SARS-CoV-2 strain; a C.37 SARS-CoV-2 strain; a B.1.621 SARS-CoV-2 strain; or a B.1.1.529 SARS-CoV-2 strain.
   14. The method of any one of enumerated embodiments 1-13, wherein the SARS-CoV-2 S glycoprotein has at least 80%, at least 81%, at least 82%, at least 83%, at least 84%, at least 85%, at least 86%, at least 87%, at least 88%, at least 89%, at least 90%, at least 91%, at least 92%, at least 93%, at least 94%, at least 95%, at least 96%, at least 97%, at least 98%, at least 99%, or 100% identity to any one of SEQ ID NOS: 2, 4, 38, 41, 44, 48, 51, 54, 58, 61, 63, 65, 67, 73, 75, 78, 79, 82, 83, 85, 106, 108, 89, and 110, 112-115, 132, 133, 114, 138, 141, 144, 147, 151, 153, 156, 158, 174, 175, 176, 181-184, 186, 188, 190, 195, 217-228, 233-236, 243, 255-264, 273-280, 283, 284, 287, 288, 291, 292, and 294, 296, 298, 300, 302, 304, 306, 308, 310, 312, 314, 316, 318, 320, 322, 324, 236, 328, 329, 330, 331, 332 and 333.
   15. The method of any one of enumerated embodiments 1-13, wherein the SARS-CoV-2 S glycoprotein has at least 80%, at least 81%, at least 82%, at least 83%, at least 84%, at least 85%, at least 86%, at least 87%, at least 88%, at least 89%, at least 90%, at least 91%, at least 92%, at least 93%, at least 94%, at least 95%, at least 96%, at least 97%, at least 98%, at least 99%, or 100% identity to to a SARS-CoV-2 S glycoprotein from a SARS-CoV-2 S omicron variant selected from the group consisting of: BA.1, BA.2.12.1, BA.2, BA.3, BA.4, BA.5, XBB.1.5, XBB.2.3, and XBB.1.16, EG.5.1, JN.1, BQ.1.1, BF.7.
   16. The method of any one of enumerated embodiments 1-15, wherein the secondary antibody is attached to a tag.
   17. The method of enumerated embodiment 16, wherein the tag is horseradish peroxidase.
   18. The method of any one of enumerated embodiments 1-17, wherein the biological sample is serum, plasma, blood, saliva, a nasopharyngeal swab, or mucus.
   19. The method of any one of enumerated embodiments 1-18, wherein the biological sample is from a patient that has previously had COVID-19.
   20. The method of any one of enumerated embodiments 1-18, wherein the biological sample is from a patient who has been administered an immunogenic composition against a SARS-CoV-2 virus or a variant thereof.
   21. The method of any one of enumerated embodiments 1-20, wherein the SARS-CoV-2 S glycoprotein includes the transmembrane domain.

1. A method for determining if a biological sample contains antibodies that bind to the SARS-CoV-2 Spike (S) glycoprotein, comprising:
(i) providing a surface coated with a SARS-CoV-2 S glycoprotein;
(ii) exposing the surface to the biological sample;
(iii) exposing the surface to a secondary antibody; and
(iv) detecting the secondary antibody that is bound to the surface;
wherein the biological sample contains antibodies that bind to the SARS-CoV-2 S glycoprotein if the secondary antibody is detected.

2. The method of claim 1, wherein the SARS-CoV-2 S glycoprotein has at least 80%, at least 81%, at least 82%, at least 83%, at least 84%, at least 85%, at least 86%, at least 87%, at least 88%, at least 89%, at least 90%, at least 91%, at least 92%, at least 93%, at least 94%, at least 95%, at least 96%, at least 97%, at least 98%, at least 99%, or 100% identity to a polypeptide of any one of SEQ ID NOS: 2, 4, 38, 41, 44, 48, 51, 54, 58, 61, 63, 65, 67, 73, 75, 78, 79, 82, 83, 85, 106, 108, 89, and 110, 112-115, 132, 133, 114, 138, 141, 144, 147, 151, 153, 156, 158, 174, 175, 176, 181-184, 186, 188, 190, 195, 217-228, 233-236, 243, 255-264, 273-280, 283, 284, 287, 288, 291, 292, and 294, 296, 298, 300, 302, 304, 306, 308, 310, 312, 314, 316, 318, 320, 322, 324, 236, 328, 329, 330, 331, 332 and 333.

3. The method of claim 1, wherein the SARS-CoV-2 S glycoprotein has an inactive furin cleavage site.

4. The method of claim 3, wherein the SARS-CoV-2 S glycoprotein has an inactive furin cleavage site having the amino acid sequence of QQAQ (SEQ ID NO: 7).

5. The method of claim 1, wherein amino acids 973 and 974 of the SARS-CoV-2 S glycoprotein are proline, as compared to a wild-type SARS-CoV-2 S glycoprotein having the amino acid sequence of SEQ ID NO: 2.

6. The method of claim 1, wherein the antibodies that bind to the SARS-CoV-2 S glycoprotein are IgG1 or IgG2 or IgG3 or IgG4.

7. The method of claim 6, wherein the antibodies that bind to the SARS-CoV-2 S glycoprotein are IgG3.

8. The method of claim 6, wherein the antibodies that bind to the SARS-CoV-2 S glycoprotein are IgG4.

9. The method of claim 1, wherein the secondary antibody is selected from the group consisting of an anti-human IgG antibody, an anti-human IgG1 antibody, an anti-human IgG2 antibody, an anti-human IgG3 antibody and an anti-human IgG4 antibody.

10. The method of claim 1, wherein the SARS-CoV-2 S glycoprotein is selected from a SARS-CoV-2 virus or a variant of SARS-CoV-2 or a subvariant of a variant of SARS-CoV-2.

11. The method of claim 10, wherein the variant of SARS-CoV-2 is a B.1.1.7 SARS-CoV-2 strain; a B.1.351 SARS-CoV-2 strain; a P.1 SARS-CoV-2 strain; a Cal.20C SARS-CoV-2 strain; a B.1.617.2 SARS-CoV-2 strain; a B.1.525 SARS-CoV-2 strain; a B.1.526 SARS-CoV-2 strain; a B.1.617.1 SARS-CoV-2 strain; a C.37 SARS-CoV-2 strain; a B.1.621 SARS-CoV-2 strain; or a B.1.1.529 SARS-CoV-2 strain.

12. The method of claim 10, wherein the variant of SARS-CoV-2 is a subvariant of a B.1.1.7 SARS-CoV-2 strain; a B.1.351 SARS-CoV-2 strain; a P.1 SARS-CoV-2 strain; a Cal.20C SARS-CoV-2 strain; a B.1.617.2 SARS-CoV-2 strain; a B.1.525 SARS-CoV-2 strain; a B.1.526 SARS-CoV-2 strain; a B.1.617.1 SARS-CoV-2 strain; a C.37 SARS-CoV-2 strain; a B.1.621 SARS-CoV-2 strain; or a B.1.1.529 SARS-CoV-2 strain.

13. The method of claim 1, wherein the SARS-CoV-2 S glycoprotein has at least 80%, at least 81%, at least 82%, at least 83%, at least 84%, at least 85%, at least 86%, at least 87%, at least 88%, at least 89%, at least 90%, at least 91%, at least 92%, at least 93%, at least 94%, at least 95%, at least 96%, at least 97%, at least 98%, at least 99%, or 100% identity to any one of SEQ ID NOS: 2, 4, 38, 41, 44, 48, 51, 54, 58, 61, 63, 65, 67, 73, 75, 78, 79, 82, 83, 85, 106, 108, 89, and 110, 112-115, 132, 133, 114, 138, 141, 144, 147, 151, 153, 156, 158, 174, 175, 176, 181-184, 186, 188, 190, 195, 217-228, 233-236, 243, 255-264, 273-280, 283, 284, 287, 288, 291, 292, and 294, 296, 298, 300, 302, 304, 306, 308, 310, 312, 314, 316, 318, 320, 322, 324, 236, 328, 329, 330, 331, 332 and 333.

14. The method of claim 1, wherein the SARS-CoV-2 S glycoprotein has at least 80%, at least 81%, at least 82%, at least 83%, at least 84%, at least 85%, at least 86%, at least 87%, at least 88%, at least 89%, at least 90%, at least 91%, at least 92%, at least 93%, at least 94%, at least 95%, at least 96%, at least 97%, at least 98%, at least 99%, or 100% identity to to a SARS-CoV-2 S glycoprotein from a SARS-CoV-2 S omicron variant selected from the group consisting of: BA.1, BA.2.12.1, BA.2, BA.3, BA.4, BA.5, XBB.1.5, XBB.2.3, and XBB.1.16, EG.5.1, JN.1, BQ.1.1, BF.7.

15. The method of claim 1, wherein the secondary antibody is attached to a tag.

16. The method of claim 15, wherein the tag is horseradish peroxidase.

17. The method of claim 1, wherein the biological sample is serum, plasma, blood, saliva, a nasopharyngeal swab, or mucus.

18. The method of claim 1, wherein the biological sample is from a patient that has previously had COVID-19.

19. The method of claim 1, wherein the biological sample is from a patient who has been administered an immunogenic composition against a SARS-CoV-2 virus or a variant thereof.

20. The method of claim 1, wherein the SARS-CoV-2 S glycoprotein includes the transmembrane domain.

The application's sequence listing, which the Patent Office published only in electronic form, follows.

SEQUENCE LISTING (333 sequences)

SEQ ID NO: 1 - protein, 1273 aa, Severe acute respiratory syndrome-related coronavirus
MFVFLVLLPLVSSQCVNLTTRTQLPPAYTNSFTRGVYYPDKVFRSSVLHSTQDLFLPFFSNVTWFHAIHVSGTNGTKRFDNPVLPFNDGVYFASTEKSNIIRGWIFGTTLDSKTQSLLIVNNATNVVIKVCEFQFCNDPFLGVYYHKNNKSWMESEFRVYSSANNCTFEYVSQPFLMDLEGKQGNFKNLREFVFKNIDGYFKIYSKHTPINLVRDLPQGFSALEPLVDLPIGINITRFQTLLALHRSYLTPGDSSSGWTAGAAAYYVGYLQPRTFLLKYNENGTITDAVDCALDPLSETKCTLKSFTVEKGIYQTSNFRVQPTESIVRFPNITNLCPFGEVFNATRFASVYAWNRKRISNCVADYSVLYNSASFSTFKCYGVSPTKLNDLCFTNVYADSFVIRGDEVRQIAPGQTGKIADYNYKLPDDFTGCVIAWNSNNLDSKVGGNYNYLYRLFRKSNLKPFERDISTEIYQAGSTPCNGVEGFNCYFPLQSYGFQPTNGVGYQPYRVVVLSFELLHAPATVCGPKKSTNLVKNKCVNFNFNGLTGTGVLTESNKKFLPFQQFGRDIADTTDAVRDPQTLEILDITPCSFGGVSVITPGTNTSNQVAVLYQDVNCTEVPVAIHADQLTPTWRVYSTGSNVFQTRAGCLIGAEHVNNSYECDIPIGAGICASYQTQTNSPRRARSVASQSIIAYTMSLGAENSVAYSNNSIAIPTNFTISVTTEILPVSMTKTSVDCTMYICGDSTECSNLLLQYGSFCTQLNRALTGIAVEQDKNTQEVFAQVKQIYKTPPIKDFGGFNFSQILPDPSKPSKRSFIEDLLFNKVTLADAGFIKQYGDCLGDIAARDLICAQKFNGLTVLPPLLTDEMIAQYTSALLAGTITSGWTFGAGAALQIPFAMQMAYRFNGIGVTQNVLYENQKLIANQFNSAIGKIQDSLSSTASALGKLQDVVNQNAQALNTLVKQLSSNFGAISSVLNDILSRLDKVEAEVQIDRLITGRLQSLQTYVTQQLIRAAEIRASANLAATKMSECVLGQSKRVDFCGKGYHLMSFPQSAPHGVVFLHVTYVPAQEKNFTTAPAICHDGKAHFPREGVFVSNGTHWFVTQRNFYEPQIITTDNTFVSGNCDVVIGIVNNTVYDPLQPELDSFKEELDKYFKNHTSPDVDLGDISGINASVVNIQKEIDRLNEVAKNLNESLIDLQELGKYEQYIKWPWYIWLGFIAGLIAIVMVTIMLCCMTSCCSCLKGCCSCGSCCKFDEDDSEPVLKGVKLHYT

SEQ ID NO: 2 - protein, 1260 aa, Severe acute respiratory syndrome-related coronavirus
QCVNLTTRTQLPPAYTNSFTRGVYYPDKVFRSSVLHSTQDLFLPFFSNVTWFHAIHVSGTNGTKRFDNPVLPFNDGVYFASTEKSNIIRGWIFGTTLDSKTQSLLIVNNATNVVIKVCEFQFCNDPFLGVYYHKNNKSWMESEFRVYSSANNCTFEYVSQPFLMDLEGKQGNFKNLREFVFKNIDGYFKIYSKHTPINLVRDLPQGFSALEPLVDLPIGINITRFQTLLALHRSYLTPGDSSSGWTAGAAAYYVGYLQPRTFLLKYNENGTITDAVDCALDPLSETKCTLKSFTVEKGIYQTSNFRVQPTESIVRFPNITNLCPFGEVFNATRFASVYAWNRKRISNCVADYSVLYNSASFSTFKCYGVSPTKLNDLCFTNVYADSFVIRGDEVRQIAPGQTGKIADYNYKLPDDFTGCVIAWNSNNLDSKVGGNYNYLYRLFRKSNLKPFERDISTEIYQAGSTPCNGVEGFNCYFPLQSYGFQPTNGVGYQPYRVVVLSFELLHAPATVCGPKKSTNLVKNKCVNFNFNGLTGTGVLTESNKKFLPFQQFGRDIADTTDAVRDPQTLEILDITPCSFGGVSVITPGTNTSNQVAVLYQDVNCTEVPVAIHADQLTPTWRVYSTGSNVFQTRAGCLIGAEHVNNSYECDIPIGAGICASYQTQTNSPRRARSVASQSIIAYTMSLGAENSVAYSNNSIAIPTNFTISVTTEILPVSMTKTSVDCTMYICGDSTECSNLLLQYGSFCTQLNRALTGIAVEQDKNTQEVFAQVKQIYKTPPIKDFGGFNFSQILPDPSKPSKRSFIEDLLFNKVTLADAGFIKQYGDCLGDIAARDLICAQKFNGLTVLPPLLTDEMIAQYTSALLAGTITSGWTFGAGAALQIPFAMQMAYRFNGIGVTQNVLYENQKLIANQFNSAIGKIQDSLSSTASALGKLQDVVNQNAQALNTLVKQLSSNFGAISSVLNDILSRLDKVEAEVQIDRLITGRLQSLQTYVTQQLIRAAEIRASANLAATKMSECVLGQSKRVDFCGKGYHLMSFPQSAPHGVVFLHVTYVPAQEKNFTTAPAICHDGKAHFPREGVFVSNGTHWFVTQRNFYEPQIITTDNTFVSGNCDVVIGIVNNTVYDPLQPELDSFKEELDKYFKNHTSPDVDLGDISGINASVVNIQKEIDRLNEVAKNLNESLIDLQELGKYEQYIKWPWYIWLGFIAGLIAIVMVTIMLCCMTSCCSCLKGCCSCGSCCKFDEDDSEPVLKGVKLHYT

SEQ ID NO: 3 - protein, 1273 aa, synthetic construct
  REGION 1..1273: note = RECOMBINANT S PROTEIN
MFVFLVLLPLVSSQCVNLTTRTQLPPAYTNSFTRGVYYPDKVFRSSVLHSTQDLFLPFFSNVTWFHAIHVSGTNGTKRFDNPVLPFNDGVYFASTEKSNIIRGWIFGTTLDSKTQSLLIVNNATNVVIKVCEFQFCNDPFLGVYYHKNNKSWMESEFRVYSSANNCTFEYVSQPFLMDLEGKQGNFKNLREFVFKNIDGYFKIYSKHTPINLVRDLPQGFSALEPLVDLPIGINITRFQTLLALHRSYLTPGDSSSGWTAGAAAYYVGYLQPRTFLLKYNENGTITDAVDCALDPLSETKCTLKSFTVEKGIYQTSNFRVQPTESIVRFPNITNLCPFGEVFNATRFASVYAWNRKRISNCVADYSVLYNSASFSTFKCYGVSPTKLNDLCFTNVYADSFVIRGDEVRQIAPGQTGKIADYNYKLPDDFTGCVIAWNSNNLDSKVGGNYNYLYRLFRKSNLKPFERDISTEIYQAGSTPCNGVEGFNCYFPLQSYGFQPTNGVGYQPYRVVVLSFELLHAPATVCGPKKSTNLVKNKCVNFNFNGLTGTGVLTESNKKFLPFQQFGRDIADTTDAVRDPQTLEILDITPCSFGGVSVITPGTNTSNQVAVLYQDVNCTEVPVAIHADQLTPTWRVYSTGSNVFQTRAGCLIGAEHVNNSYECDIPIGAGICASYQTQTNSPQQAQSVASQSIIAYTMSLGAENSVAYSNNSIAIPTNFTISVTTEILPVSMTKTSVDCTMYICGDSTECSNLLLQYGSFCTQLNRALTGIAVEQDKNTQEVFAQVKQIYKTPPIKDFGGFNFSQILPDPSKPSKRSFIEDLLFNKVTLADAGFIKQYGDCLGDIAARDLICAQKFNGLTVLPPLLTDEMIAQYTSALLAGTITSGWTFGAGAALQIPFAMQMAYRFNGIGVTQNVLYENQKLIANQFNSAIGKIQDSLSSTASALGKLQDVVNQNAQALNTLVKQLSSNFGAISSVLNDILSRLDKVEAEVQIDRLITGRLQSLQTYVTQQLIRAAEIRASANLAATKMSECVLGQSKRVDFCGKGYHLMSFPQSAPHGVVFLHVTYVPAQEKNFTTAPAICHDGKAHFPREGVFVSNGTHWFVTQRNFYEPQIITTDNTFVSGNCDVVIGIVNNTVYDPLQPELDSFKEELDKYFKNHTSPDVDLGDISGINASVVNIQKEIDRLNEVAKNLNESLIDLQELGKYEQYIKWPWYIWLGFIAGLIAIVMVTIMLCCMTSCCSCLKGCCSCGSCCKFDEDDSEPVLKGVKLHYT

SEQ ID NO: 4 - protein, 1260 aa, synthetic construct
  REGION 1..1260: note = RECOMBINANT S PROTEIN
QCVNLTTRTQLPPAYTNSFTRGVYYPDKVFRSSVLHSTQDLFLPFFSNVTWFHAIHVSGTNGTKRFDNPVLPFNDGVYFASTEKSNIIRGWIFGTTLDSKTQSLLIVNNATNVVIKVCEFQFCNDPFLGVYYHKNNKSWMESEFRVYSSANNCTFEYVSQPFLMDLEGKQGNFKNLREFVFKNIDGYFKIYSKHTPINLVRDLPQGFSALEPLVDLPIGINITRFQTLLALHRSYLTPGDSSSGWTAGAAAYYVGYLQPRTFLLKYNENGTITDAVDCALDPLSETKCTLKSFTVEKGIYQTSNFRVQPTESIVRFPNITNLCPFGEVFNATRFASVYAWNRKRISNCVADYSVLYNSASFSTFKCYGVSPTKLNDLCFTNVYADSFVIRGDEVRQIAPGQTGKIADYNYKLPDDFTGCVIAWNSNNLDSKVGGNYNYLYRLFRKSNLKPFERDISTEIYQAGSTPCNGVEGFNCYFPLQSYGFQPTNGVGYQPYRVVVLSFELLHAPATVCGPKKSTNLVKNKCVNFNFNGLTGTGVLTESNKKFLPFQQFGRDIADTTDAVRDPQTLEILDITPCSFGGVSVITPGTNTSNQVAVLYQDVNCTEVPVAIHADQLTPTWRVYSTGSNVFQTRAGCLIGAEHVNNSYECDIPIGAGICASYQTQTNSPQQAQSVASQSIIAYTMSLGAENSVAYSNNSIAIPTNFTISVTTEILPVSMTKTSVDCTMYICGDSTECSNLLLQYGSFCTQLNRALTGIAVEQDKNTQEVFAQVKQIYKTPPIKDFGGFNFSQILPDPSKPSKRSFIEDLLFNKVTLADAGFIKQYGDCLGDIAARDLICAQKFNGLTVLPPLLTDEMIAQYTSALLAGTITSGWTFGAGAALQIPFAMQMAYRFNGIGVTQNVLYENQKLIANQFNSAIGKIQDSLSSTASALGKLQDVVNQNAQALNTLVKQLSSNFGAISSVLNDILSRLDKVEAEVQIDRLITGRLQSLQTYVTQQLIRAAEIRASANLAATKMSECVLGQSKRVDFCGKGYHLMSFPQSAPHGVVFLHVTYVPAQEKNFTTAPAICHDGKAHFPREGVFVSNGTHWFVTQRNFYEPQIITTDNTFVSGNCDVVIGIVNNTVYDPLQPELDSFKEELDKYFKNHTSPDVDLGDISGINASVVNIQKEIDRLNEVAKNLNESLIDLQELGKYEQYIKWPWYIWLGFIAGLIAIVMVTIMLCCMTSCCSCLKGCCSCGSCCKFDEDDSEPVLKGVKLHYT

SEQ ID NO: 5 - protein, 13 aa, synthetic construct
  REGION 1..13: note = SIGNAL PEPTIDE
MFVFLVLLPLVSS

SEQ ID NO: 6 - protein, 4 aa, synthetic construct
  REGION 1..4: note = RECOMBINANT FURIN CLEAVAGE SITE
RRAR

SEQ ID NO: 7 - protein, 4 aa, synthetic construct
  REGION 1..4: note = RECOMBINANT FURIN CLEAVAGE SITE
QQAQ

SEQ ID NO: 8 - protein, 4 aa, synthetic construct
  REGION 1..4: note = RECOMBINANT FURIN CLEAVAGE SITE
QRAR

SEQ ID NO: 9 - protein, 4 aa, synthetic construct
  REGION 1..4: note = RECOMBINANT FURIN CLEAVAGE SITE
RQAR

SEQ ID NO: 10 - protein, 4 aa, synthetic construct
  REGION 1..4: note = RECOMBINANT FURIN CLEAVAGE SITE
RRAQ

SEQ ID NO: 11 - protein, 4 aa, synthetic construct
  REGION 1..4: note = RECOMBINANT FURIN CLEAVAGE SITE
QQAR

SEQ ID NO: 12 - protein, 4 aa, synthetic construct
  REGION 1..4: note = RECOMBINANT FURIN CLEAVAGE SITE
RQAQ

SEQ ID NO: 13 - protein, 4 aa, synthetic construct
  REGION 1..4: note = RECOMBINANT FURIN CLEAVAGE SITE
QRAQ

SEQ ID NO: 14 - protein, 4 aa, synthetic construct
  REGION 1..4: note = RECOMBINANT FURIN CLEAVAGE SITE
NNAN

SEQ ID NO: 15 - protein, 4 aa, synthetic construct
  REGION 1..4: note = RECOMBINANT FURIN CLEAVAGE SITE
NRAR

SEQ ID NO: 16 - protein, 4 aa, synthetic construct
  REGION 1..4: note = RECOMBINANT FURIN CLEAVAGE SITE
RNAR

SEQ ID NO: 17 - protein, 4 aa, synthetic construct
  REGION 1..4: note = RECOMBINANT FURIN CLEAVAGE SITE
RRAN

SEQ ID NO: 18 - protein, 4 aa, synthetic construct
  REGION 1..4: note = RECOMBINANT FURIN CLEAVAGE SITE
NNAR

SEQ ID NO: 19 - protein, 4 aa, synthetic construct
  REGION 1..4: note = RECOMBINANT FURIN CLEAVAGE SITE
RNAN

SEQ ID NO: 20 - protein, 4 aa, synthetic construct
  REGION 1..4: note = RECOMBINANT FURIN CLEAVAGE SITE
NRAN

SEQ ID NO: 21 - protein, 4 aa, synthetic construct
  REGION 1..4: note = RECOMBINANT FURIN CLEAVAGE SITE
AAAA

SEQ ID NO: 22 - protein, 4 aa, synthetic construct
  REGION 1..4: note = RECOMBINANT FURIN CLEAVAGE SITE
ARAR

SEQ ID NO: 23 - protein, 4 aa, synthetic construct
  REGION 1..4: note = RECOMBINANT FURIN CLEAVAGE SITE
RAAR

SEQ ID NO: 24 - protein, 4 aa, synthetic construct
  REGION 1..4: note = RECOMBINANT FURIN CLEAVAGE SITE
RRAA

SEQ ID NO: 25 - protein, 4 aa, synthetic construct
  REGION 1..4: note = RECOMBINANT FURIN CLEAVAGE SITE
AAAR

SEQ ID NO: 26 - protein, 4 aa, synthetic construct
  REGION 1..4: note = RECOMBINANT FURIN CLEAVAGE SITE
RAAA

SEQ ID NO: 27 - protein, 4 aa, synthetic construct
  REGION 1..4: note = RECOMBINANT FURIN CLEAVAGE SITE
ARAA

SEQ ID NO: 28 - protein, 4 aa, synthetic construct
  REGION 1..4: note = RECOMBINANT FURIN CLEAVAGE SITE
GGAG

SEQ ID NO: 29 - protein, 4 aa, synthetic construct
  REGION 1..4: note = RECOMBINANT FURIN CLEAVAGE SITE
GRAR

SEQ ID NO: 30 - protein, 4 aa, synthetic construct
  REGION 1..4: note = RECOMBINANT FURIN CLEAVAGE SITE
RGAR

SEQ ID NO: 31 - protein, 4 aa, synthetic construct
  REGION 1..4: note = RECOMBINANT FURIN CLEAVAGE SITE
RRAG

SEQ ID NO: 32 - protein, 4 aa, synthetic construct
  REGION 1..4: note = RECOMBINANT FURIN CLEAVAGE SITE
GGAR

SEQ ID NO: 33 - protein, 4 aa, synthetic construct
  REGION 1..4: note = RECOMBINANT FURIN CLEAVAGE SITE
RGAG

SEQ ID NO: 34 - protein, 4 aa, synthetic construct
  REGION 1..4: note = RECOMBINANT FURIN CLEAVAGE SITE
GRAG

SEQ ID NO: 35 - DNA, 3819 bp, synthetic construct
  misc_feature 1..3819: note = RECOMBINANT SPIKE PROTEIN
  source 1..3819: mol_type = other DNA
atgttcgtcttcctggtgctgctgcccctggtgtccagccagtgcgtgaacctgaccactaggactcagctgcctcccgcttacaccaactcattcactcgcggtgtgtactaccctgacaaggtcttccgttcttcagtgctgcactcaactcaggacctgttcctgcccttcttctccaacgtcacctggttccacgccatccacgtgtccggcaccaacggcactaagcgcttcgacaacccagtgctgcctttcaacgacggtgtctacttcgcttcaaccgagaagtccaacatcatccgtggatggatcttcggcaccactctggacagcaagactcagtctctgctgatcgtcaacaacgccaccaacgtggtcatcaaggtctgcgaattccagttctgcaacgacccattcctgggcgtctactaccacaagaacaacaagtcatggatggagtccgaattccgcgtctactccagcgctaacaactgcactttcgagtacgtgtcccagcctttcctgatggacctggaaggaaagcagggtaacttcaagaacctgagggagttcgtgttcaagaacatcgacggatacttcaagatttacagcaagcacaccccaatcaacctggtgcgcgacctgcctcagggtttctctgctctggagccactggtggacctgcctatcggcatcaacatcacccgcttccagactctgctggctctgcaccgttcctacctgactccaggcgactcatcttctggatggactgctggagctgctgcttactacgtgggctacctgcagcctcgcaccttcctgctgaagtacaacgaaaacggaaccatcactgacgccgtcgactgcgctctggaccctctgtcagaaaccaagtgcactctgaagtccttcaccgtggagaagggcatctaccagacttcaaacttcagggtgcagcccaccgaatccatcgtcagattccctaacatcactaacctgtgccccttcggagaggtcttcaacgccacccgcttcgcttccgtgtacgcctggaacaggaagagaatctcaaactgcgtcgctgactactccgtgctgtacaactcagcctccttcagcaccttcaagtgctacggcgtgtcaccaactaagctgaacgacctgtgcttcaccaacgtctacgccgactccttcgtgatcaggggagacgaggtcagacagatcgctcctggccagactggaaagatcgccgactacaactacaagctgcccgacgacttcaccggttgcgtcatcgcttggaacagcaacaacctggactctaaagtgggtggcaactacaactacctgtaccgcctgttccgtaagtcaaacctgaagccattcgagagggacatcagcactgaaatctaccaggccggatctaccccttgcaacggtgtcgagggcttcaactgctacttccccctgcagtcctacggtttccagccaactaacggtgtgggctaccagccttacagagtggtcgtgctgagcttcgaactgctccacgctcctgctactgtgtgcggtccaaagaagtctaccaacctggtcaagaacaagtgcgtgaacttcaacttcaacggcctgaccggaactggtgtcctgaccgagagcaacaagaagttcctgcccttccagcagttcggaagggacatcgctgacaccactgacgctgtgcgcgaccctcagaccctggaaatcctggacatcactccatgctcattcggaggtgtctccgtgatcacccctggcaccaacacttctaaccaggtcgctgtgctgtaccaggacgtcaactgcaccgaggtccctgtggccatccacgctgaccagctgacccccacttggcgcgtgtactccaccggcagcaacgtgttccagactcgtgctggttgcctgatcggcgccgagcacgtgaacaacagctacgaatgcgacatccccatcggcgctggaatctgcgcctcttaccagacccagactaacagcccacgcagggctcgctctgtggcctctcagtcaatcatcgcttacaccatgtcactgggcgctgaaaactccgtggcctactctaacaactcaatcgccatccccaccaacttcactatcagcgtgaccactgagatcctgccagtcagcatgaccaagacttctgtggactgcactatgtacatctgcggagacagcaccgaatgctctaacctgctgctgcagtacggctctttctgcacccagctgaaccgtgctctgactggaatcgccgtggagcaggacaagaacactcaggaagtcttcgctcaggtgaagcaaatctacaagaccccacctatcaaggacttcggcggattcaacttctcccagatcctgcctgacccctccaagccaagcaagcgctctttcatcgaggacctgctgttcaacaaggtcactctggccgacgctggattcatcaagcagtacggagactgcctgggtgacatcgccgctcgtgacctgatctgcgctcagaagttcaacggtctgaccgtgctgcccccactgctgactgacgaaatgatcgcccagtacactagcgccctgctggctggaaccatcacttctggttggaccttcggtgctggcgccgctctgcagatccctttcgctatgcagatggcctaccgtttcaacggaatcggtgtcacccagaacgtgctgtacgagaaccagaagctgatcgctaaccagttcaactcagccatcggaaagatccaggacagcctgagctctactgcctctgctctgggcaagctgcaggacgtcgtgaaccagaacgcccaggctctgaacaccctggtcaagcagctgtcatccaacttcggtgctatcagctctgtgctgaacgacatcctgtcccgcctggacaaggtcgaggccgaagtgcagatcgaccgcctgatcactggccgtctgcagtcactgcagacctacgtgactcagcagctgatcagggccgctgaaatcagagcctccgctaacctggccgctaccaagatgagcgagtgcgtcctgggtcaatctaagcgtgtggacttctgcggcaagggataccacctgatgtcattccctcagtctgctccccacggtgtggtgttcctgcacgtcacctacgtgccagcccaggagaagaacttcaccactgcccctgctatctgccacgacggcaaggctcacttccccagggaaggtgtcttcgtgagcaacggcacccactggttcgtcactcagagaaacttctacgagccacagatcatcaccactgacaacactttcgtgtctggaaactgcgacgtggtcatcggtatcgtcaacaacaccgtgtacgaccccctgcagccagagctggactcattcaaggaggaactggacaagtacttcaagaaccacacctcccctgacgtcgacctgggcgacatctcaggaatcaacgcttccgtcgtgaacatccagaaggagatcgaccgcctgaacgaagtggccaagaacctgaacgaaagcctgatcgacctgcaggagctgggcaagtacgaacagtacatcaagtggccttggtacatctggctgggtttcatcgctggcctcatcgctatcgtgatggtgaccatcatgctgtgctgcatgacttcatgctgctcctgcctgaagggctgctgcagctgcggatcttgctgcaagttcgacgaggacgactctgaacccgtcctgaagggcgtgaagctgcactacacc

SEQ ID NO: 36 - protein, 1279 aa, synthetic construct
  REGION 1..1279: note = RECOMBINANT SPIKE PROTEIN
MFVFLVLLPLVSSQCVNLTTRTQLPPAYTNSFTRGVYYPDKVFRSSVLHSTQDLFLPFFSNVTWFHAIHVSGTNGTKRFDNPVLPFNDGVYFASTEKSNIIRGWIFGTTLDSKTQSLLIVNNATNVVIKVCEFQFCNDPFLGVYYHKNNKSWMESEFRVYSSANNCTFEYVSQPFLMDLEGKQGNFKNLREFVFKNIDGYFKIYSKHTPINLVRDLPQGFSALEPLVDLPIGINITRFQTLLALHRSYLTPGDSSSGWTAGAAAYYVGYLQPRTFLLKYNENGTITDAVDCALDPLSETKCTLKSFTVEKGIYQTSNFRVQPTESIVRFPNITNLCPFGEVFNATRFASVYAWNRKRISNCVADYSVLYNSASFSTFKCYGVSPTKLNDLCFTNVYADSFVIRGDEVRQIAPGQTGKIADYNYKLPDDFTGCVIAWNSNNLDSKVGGNYNYLYRLFRKSNLKPFERDISTEIYQAGSTPCNGVEGFNCYFPLQSYGFQPTNGVGYQPYRVVVLSFELLHAPATVCGPKKSTNLVKNKCVNFNFNGLTGTGVLTESNKKFLPFQQFGRDIADTTDAVRDPQTLEILDITPCSFGGVSVITPGTNTSNQVAVLYQDVNCTEVPVAIHADQLTPTWRVYSTGSNVFQTRAGCLIGAEHVNNSYECDIPIGAGICASYQTQTNSPRRARSVASQSIIAYTMSLGAENSVAYSNNSIAIPTNFTISVTTEILPVSMTKTSVDCTMYICGDSTECSNLLLQYGSFCTQLNRALTGIAVEQDKNTQEVFAQVKQIYKTPPIKDFGGFNFSQILPDPSKPSKRSFIEDLLFNKVTLADAGFIKQYGDCLGDIAARDLICAQKFNGLTVLPPLLTDEMIAQYTSALLAGTITSGWTFGAGAALQIPFAMQMAYRFNGIGVTQNVLYENQKLIANQFNSAIGKIQDSLSSTASALGKLQDVVNQNAQALNTLVKQLSSNFGAISSVLNDILSRLDKVEAEVQIDRLITGRLQSLQTYVTQQLIRAAEIRASANLAATKMSECVLGQSKRVDFCGKGYHLMSFPQSAPHGVVFLHVTYVPAQEKNFTTAPAICHDGKAHFPREGVFVSNGTHWFVTQRNFYEPQIITTDNTFVSGNCDVVIGIVNNTVYDPLQPELDSFKEELDKYFKNHTSPDVDLGDISGINASVVNIQKEIDRLNEVAKNLNESLIDLQELGKYEQYIKWPWYIWLGFIAGLIAIVMVTIMLCCMTSCCSCLKGCCSCGSCCKFDEDDSEPVLKGVKLHYTHHHHHH

SEQ ID NO: 37 - DNA, 3837 bp, synthetic construct
  misc_feature 1..3837: note = RECOMBINANT SPIKE PROTEIN
  source 1..3837: mol_type = other DNA
atgttcgtcttcctggtgctgctgcccctggtgtccagccagtgcgtgaacctgaccactaggactcagctgcctcccgcttacaccaactcattcactcgcggtgtgtactaccctgacaaggtcttccgttcttcagtgctgcactcaactcaggacctgttcctgcccttcttctccaacgtcacctggttccacgccatccacgtgtccggcaccaacggcactaagcgcttcgacaacccagtgctgcctttcaacgacggtgtctacttcgcttcaaccgagaagtccaacatcatccgtggatggatcttcggcaccactctggacagcaagactcagtctctgctgatcgtcaacaacgccaccaacgtggtcatcaaggtctgcgaattccagttctgcaacgacccattcctgggcgtctactaccacaagaacaacaagtcatggatggagtccgaattccgcgtctactccagcgctaacaactgcactttcgagtacgtgtcccagcctttcctgatggacctggaaggaaagcagggtaacttcaagaacctgagggagttcgtgttcaagaacatcgacggatacttcaagatttacagcaagcacaccccaatcaacctggtgcgcgacctgcctcagggtttctctgctctggagccactggtggacctgcctatcggcatcaacatcacccgcttccagactctgctggctctgcaccgttcctacctgactccaggcgactcatcttctggatggactgctggagctgctgcttactacgtgggctacctgcagcctcgcaccttcctgctgaagtacaacgaaaacggaaccatcactgacgccgtcgactgcgctctggaccctctgtcagaaaccaagtgcactctgaagtccttcaccgtggagaagggcatctaccagacttcaaacttcagggtgcagcccaccgaatccatcgtcagattccctaacatcactaacctgtgccccttcggagaggtcttcaacgccacccgcttcgcttccgtgtacgcctggaacaggaagagaatctcaaactgcgtcgctgactactccgtgctgtacaactcagcctccttcagcaccttcaagtgctacggcgtgtcaccaactaagctgaacgacctgtgcttcaccaacgtctacgccgactccttcgtgatcaggggagacgaggtcagacagatcgctcctggccagactggaaagatcgccgactacaactacaagctgcccgacgacttcaccggttgcgtcatcgcttggaacagcaacaacctggactctaaagtgggtggcaactacaactacctgtaccgcctgttccgtaagtcaaacctgaagccattcgagagggacatcagcactgaaatctaccaggccggatctaccccttgcaacggtgtcgagggcttcaactgctacttccccctgcagtcctacggtttccagccaactaacggtgtgggctaccagccttacagagtggtcgtgctgagcttcgaactgctccacgctcctgctactgtgtgcggtccaaagaagtctaccaacctggtcaagaacaagtgcgtgaacttcaacttcaacggcctgaccggaactggtgtcctgaccgagagcaacaagaagttcctgcccttccagcagttcggaagggacatcgctgacaccactgacgctgtgcgcgaccctcagaccctggaaatcctggacatcactccatgctcattcggaggtgtctccgtgatcacccctggcaccaacacttctaaccaggtcgctgtgctgtaccaggacgtcaactgcaccgaggtccctgtggccatccacgctgaccagctgacccccacttggcgcgtgtactccaccggcagcaacgtgttccagactcgtgctggttgcctgatcggcgccgagcacgtgaacaacagctacgaatgcgacatccccatcggcgctggaatctgcgcctcttaccagacccagactaacagcccacgcagggctcgctctgtggcctctcagtcaatcatcgcttacaccatgtcactgggcgctgaaaactccgtggcctactctaacaactcaatcgccatccccaccaacttcactatcagcgtgaccactgagatcctgccagtcagcatgaccaagacttctgtggactgcactatgtacatctgcggagacagcaccgaatgctctaacctgctgctgcagtacggctctttctgcacccagctgaaccgtgctctgactggaatcgccgtggagcaggacaagaacactcaggaagtcttcgctcaggtgaagcaaatctacaagaccccacctatcaaggacttcggcggattcaacttctcccagatcctgcctgacccctccaagccaagcaagcgctctttcatcgaggacctgctgttcaacaaggtcactctggccgacgctggattcatcaagcagtacggagactgcctgggtgacatcgccgctcgtgacctgatctgcgctcagaagttcaacggtctgaccgtgctgcccccactgctgactgacgaaatgatcgcccagtacactagcgccctgctggctggaaccatcacttctggttggaccttcggtgctggcgccgctctgcagatccctttcgctatgcagatggcctaccgtttcaacggaatcggtgtcacccagaacgtgctgtacgagaaccagaagctgatcgctaaccagttcaactcagccatcggaaagatccaggacagcctgagctctactgcctctgctctgggcaagctgcaggacgtcgtgaaccagaacgcccaggctctgaacaccctggtcaagcagctgtcatccaacttcggtgctatcagctctgtgctgaacgacatcctgtcccgcctggacaaggtcgaggccgaagtgcagatcgaccgcctgatcactggccgtctgcagtcactgcagacctacgtgactcagcagctgatcagggccgctgaaatcagagcctccgctaacctggccgctaccaagatgagcgagtgcgtcctgggtcaatctaagcgtgtggacttctgcggcaagggataccacctgatgtcattccctcagtctgctccccacggtgtggtgttcctgcacgtcacctacgtgccagcccaggagaagaacttcaccactgcccctgctatctgccacgacggcaaggctcacttccccagggaaggtgtcttcgtgagcaacggcacccactggttcgtcactcagagaaacttctacgagccacagatcatcaccactgacaacactttcgtgtctggaaactgcgacgtggtcatcggtatcgtcaacaacaccgtgtacgaccccctgcagccagagctggactcattcaaggaggaactggacaagtacttcaagaaccacacctcccctgacgtcgacctgggcgacatctcaggaatcaacgcttccgtcgtgaacatccagaaggagatcgaccgcctgaacgaagtggccaagaacctgaacgaaagcctgatcgacctgcaggagctgggcaagtacgaacagtacatcaagtggccttggtacatctggctgggtttcatcgctggcctcatcgctatcgtgatggtgaccatcatgctgtgctgcatgacttcatgctgctcctgcctgaagggctgctgcagctgcggatcttgctgcaagttcgacgaggacgactctgaacccgtcctgaagggcgtgaagctgcactacacccaccaccaccaccaccac

SEQ ID NO: 38 - protein, 1266 aa, synthetic construct
  REGION 1..1266: note = RECOMBINANT SPIKE PROTEIN
QCVNLTTRTQLPPAYTNSFTRGVYYPDKVFRSSVLHSTQDLFLPFFSNVTWFHAIHVSGTNGTKRFDNPVLPFNDGVYFASTEKSNIIRGWIFGTTLDSKTQSLLIVNNATNVVIKVCEFQFCNDPFLGVYYHKNNKSWMESEFRVYSSANNCTFEYVSQPFLMDLEGKQGNFKNLREFVFKNIDGYFKIYSKHTPINLVRDLPQGFSALEPLVDLPIGINITRFQTLLALHRSYLTPGDSSSGWTAGAAAYYVGYLQPRTFLLKYNENGTITDAVDCALDPLSETKCTLKSFTVEKGIYQTSNFRVQPTESIVRFPNITNLCPFGEVFNATRFASVYAWNRKRISNCVADYSVLYNSASFSTFKCYGVSPTKLNDLCFTNVYADSFVIRGDEVRQIAPGQTGKIADYNYKLPDDFTGCVIAWNSNNLDSKVGGNYNYLYRLFRKSNLKPFERDISTEIYQAGSTPCNGVEGFNCYFPLQSYGFQPTNGVGYQPYRVVVLSFELLHAPATVCGPKKSTNLVKNKCVNFNFNGLTGTGVLTESNKKFLPFQQFGRDIADTTDAVRDPQTLEILDITPCSFGGVSVITPGTNTSNQVAVLYQDVNCTEVPVAIHADQLTPTWRVYSTGSNVFQTRAGCLIGAEHVNNSYECDIPIGAGICASYQTQTNSPRRARSVASQSIIAYTMSLGAENSVAYSNNSIAIPTNFTISVTTEILPVSMTKTSVDCTMYICGDSTECSNLLLQYGSFCTQLNRALTGIAVEQDKNTQEVFAQVKQIYKTPPIKDFGGFNFSQILPDPSKPSKRSFIEDLLFNKVTLADAGFIKQYGDCLGDIAARDLICAQKFNGLTVLPPLLTDEMIAQYTSALLAGTITSGWTFGAGAALQIPFAMQMAYRFNGIGVTQNVLYENQKLIANQFNSAIGKIQDSLSSTASALGKLQDVVNQNAQALNTLVKQLSSNFGAISSVLNDILSRLDKVEAEVQIDRLITGRLQSLQTYVTQQLIRAAEIRASANLAATKMSECVLGQSKRVDFCGKGYHLMSFPQSAPHGVVFLHVTYVPAQEKNFTTAPAICHDGKAHFPREGVFVSNGTHWFVTQRNFYEPQIITTDNTFVSGNCDVVIGIVNNTVYDPLQPELDSFKEELDKYFKNHTSPDVDLGDISGINASVVNIQKEIDRLNEVAKNLNESLIDLQELGKYEQYIKWPWYIWLGFIAGLIAIVMVTIMLCCMTSCCSCLKGCCSCGSCCKFDEDDSEPVLKGVKLHYTHHHHHH

SEQ ID NO: 39 - protein, 60 aa, synthetic construct
  REGION 1..60: note = RECOMBINANT SPIKE PROTEIN
WYIWLGFIAGLIAIVMVTIMLCCMTSCCSCLKGCCSCGSCCKFDEDDSEPVLKGVKLHYT

SEQ ID NO: 40 - protein, 1213 aa, synthetic construct
  REGION 1..1213: note = RECOMBINANT SPIKE PROTEIN
MFVFLVLLPLVSSQCVNLTTRTQLPPAYTNSFTRGVYYPDKVFRSSVLHSTQDLFLPFFSNVTWFHAIHVSGTNGTKRFDNPVLPFNDGVYFASTEKSNIIRGWIFGTTLDSKTQSLLIVNNATNVVIKVCEFQFCNDPFLGVYYHKNNKSWMESEFRVYSSANNCTFEYVSQPFLMDLEGKQGNFKNLREFVFKNIDGYFKIYSKHTPINLVRDLPQGFSALEPLVDLPIGINITRFQTLLALHRSYLTPGDSSSGWTAGAAAYYVGYLQPRTFLLKYNENGTITDAVDCALDPLSETKCTLKSFTVEKGIYQTSNFRVQPTESIVRFPNITNLCPFGEVFNATRFASVYAWNRKRISNCVADYSVLYNSASFSTFKCYGVSPTKLNDLCFTNVYADSFVIRGDEVRQIAPGQTGKIADYNYKLPDDFTGCVIAWNSNNLDSKVGGNYNYLYRLFRKSNLKPFERDISTEIYQAGSTPCNGVEGFNCYFPLQSYGFQPTNGVGYQPYRVVVLSFELLHAPATVCGPKKSTNLVKNKCVNFNFNGLTGTGVLTESNKKFLPFQQFGRDIADTTDAVRDPQTLEILDITPCSFGGVSVITPGTNTSNQVAVLYQDVNCTEVPVAIHADQLTPTWRVYSTGSNVFQTRAGCLIGAEHVNNSYECDIPIGAGICASYQTQTNSPRRARSVASQSIIAYTMSLGAENSVAYSNNSIAIPTNFTISVTTEILPVSMTKTSVDCTMYICGDSTECSNLLLQYGSFCTQLNRALTGIAVEQDKNTQEVFAQVKQIYKTPPIKDFGGFNFSQILPDPSKPSKRSFIEDLLFNKVTLADAGFIKQYGDCLGDIAARDLICAQKFNGLTVLPPLLTDEMIAQYTSALLAGTITSGWTFGAGAALQIPFAMQMAYRFNGIGVTQNVLYENQKLIANQFNSAIGKIQDSLSSTASALGKLQDVVNQNAQALNTLVKQLSSNFGAISSVLNDILSRLDKVEAEVQIDRLITGRLQSLQTYVTQQLIRAAEIRASANLAATKMSECVLGQSKRVDFCGKGYHLMSFPQSAPHGVVFLHVTYVPAQEKNFTTAPAICHDGKAHFPREGVFVSNGTHWFVTQRNFYEPQIITTDNTFVSGNCDVVIGIVNNTVYDPLQPELDSFKEELDKYFKNHTSPDVDLGDISGINASVVNIQKEIDRLNEVAKNLNESLIDLQELGKYEQYIKWP

SEQ ID NO: 41 - protein, 1200 aa, synthetic construct
  REGION 1..1200: note = RECOMBINANT SPIKE PROTEIN
QCVNLTTRTQLPPAYTNSFTRGVYYPDKVFRSSVLHSTQDLFLPFFSNVTWFHAIHVSGTNGTKRFDNPVLPFNDGVYFASTEKSNIIRGWIFGTTLDSKTQSLLIVNNATNVVIKVCEFQFCNDPFLGVYYHKNNKSWMESEFRVYSSANNCTFEYVSQPFLMDLEGKQGNFKNLREFVFKNIDGYFKIYSKHTPINLVRDLPQGFSALEPLVDLPIGINITRFQTLLALHRSYLTPGDSSSGWTAGAAAYYVGYLQPRTFLLKYNENGTITDAVDCALDPLSETKCTLKSFTVEKGIYQTSNFRVQPTESIVRFPNITNLCPFGEVFNATRFASVYAWNRKRISNCVADYSVLYNSASFSTFKCYGVSPTKLNDLCFTNVYADSFVIRGDEVRQIAPGQTGKIADYNYKLPDDFTGCVIAWNSNNLDSKVGGNYNYLYRLFRKSNLKPFERDISTEIYQAGSTPCNGVEGFNCYFPLQSYGFQPTNGVGYQPYRVVVLSFELLHAPATVCGPKKSTNLVKNKCVNFNFNGLTGTGVLTESNKKFLPFQQFGRDIADTTDAVRDPQTLEILDITPCSFGGVSVITPGTNTSNQVAVLYQDVNCTEVPVAIHADQLTPTWRVYSTGSNVFQTRAGCLIGAEHVNNSYECDIPIGAGICASYQTQTNSPRRARSVASQSIIAYTMSLGAENSVAYSNNSIAIPTNFTISVTTEILPVSMTKTSVDCTMYICGDSTECSNLLLQYGSFCTQLNRALTGIAVEQDKNTQEVFAQVKQIYKTPPIKDFGGFNFSQILPDPSKPSKRSFIEDLLFNKVTLADAGFIKQYGDCLGDIAARDLICAQKFNGLTVLPPLLTDEMIAQYTSALLAGTITSGWTFGAGAALQIPFAMQMAYRFNGIGVTQNVLYENQKLIANQFNSAIGKIQDSLSSTASALGKLQDVVNQNAQALNTLVKQLSSNFGAISSVLNDILSRLDKVEAEVQIDRLITGRLQSLQTYVTQQLIRAAEIRASANLAATKMSECVLGQSKRVDFCGKGYHLMSFPQSAPHGVVFLHVTYVPAQEKNFTTAPAICHDGKAHFPREGVFVSNGTHWFVTQRNFYEPQIITTDNTFVSGNCDVVIGIVNNTVYDPLQPELDSFKEELDKYFKNHTSPDVDLGDISGINASVVNIQKEIDRLNEVAKNLNESLIDLQELGKYEQYIKWP

SEQ ID NO: 42 - protein, 1219 aa, synthetic construct
  REGION 1..1219: note = RECOMBINANT SPIKE PROTEIN
MFVFLVLLPLVSSQCVNLTTRTQLPPAYTNSFTRGVYYPDKVFRSSVLHSTQDLFLPFFSNVTWFHAIHVSGTNGTKRFDNPVLPFNDGVYFASTEKSNIIRGWIFGTTLDSKTQSLLIVNNATNVVIKVCEFQFCNDPFLGVYYHKNNKSWMESEFRVYSSANNCTFEYVSQPFLMDLEGKQGNFKNLREFVFKNIDGYFKIYSKHTPINLVRDLPQGFSALEPLVDLPIGINITRFQTLLALHRSYLTPGDSSSGWTAGAAAYYVGYLQPRTFLLKYNENGTITDAVDCALDPLSETKCTLKSFTVEKGIYQTSNFRVQPTESIVRFPNITNLCPFGEVFNATRFASVYAWNRKRISNCVADYSVLYNSASFSTFKCYGVSPTKLNDLCFTNVYADSFVIRGDEVRQIAPGQTGKIADYNYKLPDDFTGCVIAWNSNNLDSKVGGNYNYLYRLFRKSNLKPFERDISTEIYQAGSTPCNGVEGFNCYFPLQSYGFQPTNGVGYQPYRVVVLSFELLHAPATVCGPKKSTNLVKNKCVNFNFNGLTGTGVLTESNKKFLPFQQFGRDIADTTDAVRDPQTLEILDITPCSFGGVSVITPGTNTSNQVAVLYQDVNCTEVPVAIHADQLTPTWRVYSTGSNVFQTRAGCLIGAEHVNNSYECDIPIGAGICASYQTQTNSPRRARSVASQSIIAYTMSLGAENSVAYSNNSIAIPTNFTISVTTEILPVSMTKTSVDCTMYICGDSTECSNLLLQYGSFCTQLNRALTGIAVEQDKNTQEVFAQVKQIYKTPPIKDFGGFNFSQILPDPSKPSKRSFIEDLLFNKVTLADAGFIKQYGDCLGDIAARDLICAQKFNGLTVLPPLLTDEMIAQYTSALLAGTITSGWTFGAGAALQIPFAMQMAYRFNGIGVTQNVLYENQKLIANQFNSAIGKIQDSLSSTASALGKLQDVVNQNAQALNTLVKQLSSNFGAISSVLNDILSRLDKVEAEVQIDRLITGRLQSLQTYVTQQLIRAAEIRASANLAATKMSECVLGQSKRVDFCGKGYHLMSFPQSAPHGVVFLHVTYVPAQEKNFTTAPAICHDGKAHFPREGVFVSNGTHWFVTQRNFYEPQIITTDNTFVSGNCDVVIGIVNNTVYDPLQPELDSFKEELDKYFKNHTSPDVDLGDISGINASVVNIQKEIDRLNEVAKNLNESLIDLQELGKYEQYIKWPHHHHHH

SEQ ID NO: 43 - DNA, 3657 bp, synthetic construct
  misc_feature 1..3657: note = RECOMBINANT SPIKE PROTEIN
  source 1..3657: mol_type = other DNA
atgttcgtcttcctggtgctgctgcccctggtgtccagccagtgcgtgaacctgaccactaggactcagctgcctcccgcttacaccaactcattcactcgcggtgtgtactaccctgacaaggtcttccgttcttcagtgctgcactcaactcaggacctgttcctgcccttcttctccaacgtcacctggttccacgccatccacgtgtccggcaccaacggcactaagcgcttcgacaacccagtgctgcctttcaacgacggtgtctacttcgcttcaaccgagaagtccaacatcatccgtggatggatcttcggcaccactctggacagcaagactcagtctctgctgatcgtcaacaacgccaccaacgtggtcatcaaggtctgcgaattccagttctgcaacgacccattcctgggcgtctactaccacaagaacaacaagtcatggatggagtccgaattccgcgtctactccagcgctaacaactgcactttcgagtacgtgtcccagcctttcctgatggacctggaaggaaagcagggtaacttcaagaacctgagggagttcgtgttcaagaacatcgacggatacttcaagatttacagcaagcacaccccaatcaacctggtgcgcgacctgcctcagggtttctctgctctggagccactggtggacctgcctatcggcatcaacatcacccgcttccagactctgctggctctgcaccgttcctacctgactccaggcgactcatcttctggatggactgctggagctgctgcttactacgtgggctacctgcagcctcgcaccttcctgctgaagtacaacgaaaacggaaccatcactgacgccgtcgactgcgctctggaccctctgtcagaaaccaagtgcactctgaagtccttcaccgtggagaagggcatctaccagacttcaaacttcagggtgcagcccaccgaatccatcgtcagattccctaacatcactaacctgtgccccttcggagaggtcttcaacgccacccgcttcgcttccgtgtacgcctggaacaggaagagaatctcaaactgcgtcgctgactactccgtgctgtacaactcagcctccttcagcaccttcaagtgctacggcgtgtcaccaactaagctgaacgacctgtgcttcaccaacgtctacgccgactccttcgtgatcaggggagacgaggtcagacagatcgctcctggccagactggaaagatcgccgactacaactacaagctgcccgacgacttcaccggttgcgtcatcgcttggaacagcaacaacctggactctaaagtgggtggcaactacaactacctgtaccgcctgttccgtaagtcaaacctgaagccattcgagagggacatcagcactgaaatctaccaggccggatctaccccttgcaacggtgtcgagggcttcaactgctacttccccctgcagtcctacggtttccagccaactaacggtgtgggctaccagccttacagagtggtcgtgctgagcttcgaactgctccacgctcctgctactgtgtgcggtccaaagaagtctaccaacctggtcaagaacaagtgcgtgaacttcaacttcaacggcctgaccggaactggtgtcctgaccgagagcaacaagaagttcctgcccttccagcagttcggaagggacatcgctgacaccactgacgctgtgcgcgaccctcagaccctggaaatcctggacatcactccatgctcattcggaggtgtctccgtgatcacccctggcaccaacacttctaaccaggtcgctgtgctgtaccaggacgtcaactgcaccgaggtccctgtggccatccacgctgaccagctgacccccacttggcgcgtgtactccaccggcagcaacgtgttccagactcgtgctggttgcctgatcggcgccgagcacgtgaacaacagctacgaatgcgacatccccatcggcgctggaatctgcgcctcttaccagacccagactaacagcccacgcagggctcgctctgtggcctctcagtcaatcatcgcttacaccatgtcactgggcgctgaaaactccgtggcctactctaacaactcaatcgccatccccaccaacttcactatcagcgtgaccactgagatcctgccagtcagcatgaccaagacttctgtggactgcactatgtacatctgcggagacagcaccgaatgctctaacctgctgctgcagtacggctctttctgcacccagctgaaccgtgctctgactggaatcgccgtggagcaggacaagaacactcaggaagtcttcgctcaggtgaagcaaatctacaagaccccacctatcaaggacttcggcggattcaacttctcccagatcctgcctgacccctccaagccaagcaagcgctctttcatcgaggacctgctgttcaacaaggtcactctggccgacgctggattcatcaagcagtacggagactgcctgggtgacatcgccgctcgtgacctgatctgcgctcagaagttcaacggtctgaccgtgctgcccccactgctgactgacgaaatgatcgcccagtacactagcgccctgctggctggaaccatcacttctggttggaccttcggtgctggcgccgctctgcagatccctttcgctatgcagatggcctaccgtttcaacggaatcggtgtcacccagaacgtgctgtacgagaaccagaagctgatcgctaaccagttcaactcagccatcggaaagatccaggacagcctgagctctactgcctctgctctgggcaagctgcaggacgtcgtgaaccagaacgcccaggctctgaacaccctggtcaagcagctgtcatccaacttcggtgctatcagctctgtgctgaacgacatcctgtcccgcctggacaaggtcgaggccgaagtgcagatcgaccgcctgatcactggccgtctgcagtcactgcagacctacgtgactcagcagctgatcagggccgctgaaatcagagcctccgctaacctggccgctaccaagatgagcgagtgcgtcctgggtcaatctaagcgtgtggacttctgcggcaagggataccacctgatgtcattccctcagtctgctccccacggtgtggtgttcctgcacgtcacctacgtgccagcccaggagaagaacttcaccactgcccctgctatctgccacgacggcaaggctcacttccccagggaaggtgtcttcgtgagcaacggcacccactggttcgtcactcagagaaacttctacgagccacagatcatcaccactgacaacactttcgtgtctggaaactgcgacgtggtcatcggtatcgtcaacaacaccgtgtacgaccccctgcagccagagctggactcattcaaggaggaactggacaagtacttcaagaaccacacctcccctgacgtcgacctgggcgacatctcaggaatcaacgcttccgtcgtgaacatccagaaggagatcgaccgcctgaacgaagtggccaagaacctgaacgaaagcctgatcgacctgcaggagctgggcaagtacgaacagtacatcaagtggcctcaccaccaccaccaccac

SEQ ID NO: 44 - protein, 1219 aa, synthetic construct; identical to SEQ ID NO: 42
  REGION 1..1219: note = RECOMBINANT SPIKE PROTEIN

SEQ ID NO: 45 - protein, 318 aa, synthetic construct
  REGION 1..318: note = RECOMBINANT SPIKE PROTEIN
QCVNLTTRTQLPPAYTNSFTRGVYYPDKVFRSSVLHSTQDLFLPFFSNVTWFHAIHVSGTNGTKRFDNPVLPFNDGVYFASTEKSNIIRGWIFGTTLDSKTQSLLIVNNATNVVIKVCEFQFCNDPFLGVYYHKNNKSWMESEFRVYSSANNCTFEYVSQPFLMDLEGKQGNFKNLREFVFKNIDGYFKIYSKHTPINLVRDLPQGFSALEPLVDLPIGINITRFQTLLALHRSYLTPGDSSSGWTAGAAAYYVGYLQPRTFLLKYNENGTITDAVDCALDPLSETKCTLKSFTVEKGIYQTSNFRVQPTESIVRFPN

SEQ ID NO: 46 - protein, 955 aa, synthetic construct
  REGION 1..955: note = RECOMBINANT SPIKE PROTEIN
MFVFLVLLPLVSSITNLCPFGEVFNATRFASVYAWNRKRISNCVADYSVLYNSASFSTFKCYGVSPTKLNDLCFTNVYADSFVIRGDEVRQIAPGQTGKIADYNYKLPDDFTGCVIAWNSNNLDSKVGGNYNYLYRLFRKSNLKPFERDISTEIYQAGSTPCNGVEGFNCYFPLQSYGFQPTNGVGYQPYRVVVLSFELLHAPATVCGPKKSTNLVKNKCVNFNFNGLTGTGVLTESNKKFLPFQQFGRDIADTTDAVRDPQTLEILDITPCSFGGVSVITPGTNTSNQVAVLYQDVNCTEVPVAIHADQLTPTWRVYSTGSNVFQTRAGCLIGAEHVNNSYECDIPIGAGICASYQTQTNSPRRARSVASQSIIAYTMSLGAENSVAYSNNSIAIPTNFTISVTTEILPVSMTKTSVDCTMYICGDSTECSNLLLQYGSFCTQLNRALTGIAVEQDKNTQEVFAQVKQIYKTPPIKDFGGFNFSQILPDPSKPSKRSFIEDLLFNKVTLADAGFIKQYGDCLGDIAARDLICAQKFNGLTVLPPLLTDEMIAQYTSALLAGTITSGWTFGAGAALQIPFAMQMAYRFNGIGVTQNVLYENQKLIANQFNSAIGKIQDSLSSTASALGKLQDVVNQNAQALNTLVKQLSSNFGAISSVLNDILSRLDKVEAEVQIDRLITGRLQSLQTYVTQQLIRAAEIRASANLAATKMSECVLGQSKRVDFCGKGYHLMSFPQSAPHGVVFLHVTYVPAQEKNFTTAPAICHDGKAHFPREGVFVSNGTHWFVTQRNFYEPQIITTDNTFVSGNCDVVIGIVNNTVYDPLQPELDSFKEELDKYFKNHTSPDVDLGDISGINASVVNIQKEIDRLNEVAKNLNESLIDLQELGKYEQYIKWPWYIWLGFIAGLIAIVMVTIMLCCMTSCCSCLKGCCSCGSCCKFDEDDSEPVLKGVKLHYT

SEQ ID NO: 47 - DNA, 2868 bp, synthetic construct
  misc_feature 1..2868: note = RECOMBINANT SPIKE PROTEIN
  source 1..2868: mol_type = other DNA
atgttcgtcttcctggtgctgctgcccctggtgtccagcatcactaacctgtgccccttcggagaggtcttcaacgccacccgcttcgcttccgtgtacgcctggaacaggaagagaatctcaaactgcgtcgctgactactccgtgctgtacaactcagcctccttcagcaccttcaagtgctacggcgtgtcaccaactaagctgaacgacctgtgcttcaccaacgtctacgccgactccttcgtgatcaggggagacgaggtcagacagatcgctcctggccagactggaaagatcgccgactacaactacaagctgcccgacgacttcaccggttgcgtcatcgcttggaacagcaacaacctggactctaaagtgggtggcaactacaactacctgtaccgcctgttccgtaagtcaaacctgaagccattcgagagggacatcagcactgaaatctaccaggccggatctaccccttgcaacggtgtcgagggcttcaactgctacttccccctgcagtcctacggtttccagccaactaacggtgtgggctaccagccttacagagtggtcgtgctgagcttcgaactgctccacgctcctgctactgtgtgcggtccaaagaagtctaccaacctggtcaagaacaagtgcgtgaacttcaacttcaacggcctgaccggaactggtgtcctgaccgagagcaacaagaagttcctgcccttccagcagttcggaagggacatcgctgacaccactgacgctgtgcgcgaccctcagaccctggaaatcctggacatcactccatgctcattcggaggtgtctccgtgatcacccctggcaccaacacttctaaccaggtcgctgtgctgtaccaggacgtcaactgcaccgaggtccctgtggccatccacgctgaccagctgacccccacttggcgcgtgtactccaccggcagcaacgtgttccagactcgtgctggttgcctgatcggcgccgagcacgtgaacaacagctacgaatgcgacatccccatcggcgctggaatctgcgcctcttaccagacccagactaacagcccacgcagggctcgctctgtggcctctcagtcaatcatcgcttacaccatgtcactgggcgctgaaaactccgtggcctactctaacaactcaatcgccatccccaccaacttcactatcagcgtgaccactgagatcctgccagtcagcatgaccaagacttctgtggactgcactatgtacatctgcggagacagcaccgaatgctctaacctgctgctgcagtacggctctttctgcacccagctgaaccgtgctctgactggaatcgccgtggagcaggacaagaacactcaggaagtcttcgctcaggtgaagcaaatctacaagaccccacctatcaaggacttcggcggattcaacttctcccagatcctgcctgacccctccaagccaagcaagcgctctttcatcgaggacctgctgttcaacaaggtcactctggccgacgctggattcatcaagcagtacggagactgcctgggtgacatcgccgctcgtgacctgatctgcgctcagaagttcaacggtctgaccgtgctgcccccactgctgactgacgaaatgatcgcccagtacactagcgccctgctggctggaaccatcacttctggttggaccttcggtgctggcgccgctctgcagatccctttcgctatgcagatggcctaccgtttcaacggaatcggtgtcacccagaacgtgctgtacgagaaccagaagctgatcgctaaccagttcaactcagccatcggaaagatccaggacagcctgagctctactgcctctgctctgggcaagctgcaggacgtcgtgaaccagaacgcccaggctctgaacaccctggtcaagcagctgtcatccaacttcggtgctatcagctctgtgctgaacgacatcctgtcccgcctggacaaggtcgaggccgaagtgcagatcgaccgcctgatcactggccgtctgcagtcactgcagacctacgtgactcagcagctgatcagggccgctgaaatcagagcctccgctaacctggccgctaccaagatgagcgagtgcgtcctgggtcaatctaagcgtgtggacttctgcggcaagggataccacctgatgtcattccctcagtctgctccccacggtgtggtgttcctgcacgtcacctacgtgccagcccaggagaagaacttcaccactgcccctgctatctgccacgacggcaaggctcacttccccagggaaggtgtcttcgtgagcaacggcacccactggttcgtcactcagagaaacttctacgagccacagatcatcaccactgacaacactttcgtgtctggaaactgcgacgtggtcatcggtatcgtcaacaacaccgtgtacgaccccctgcagccagagctggactcattcaaggaggaactggacaagtacttcaagaaccacacctcccctgacgtcgacctgggcgacatctcaggaatcaacgcttccgtcgtgaacatccagaaggagatcgaccgcctgaacgaagtggccaagaacctgaacgaaagcctgatcgacctgcaggagctgggcaagtacgaacagtacatcaagtggccttggtacatctggctgggtttcatcgctggcctcatcgctatcgtgatggtgaccatcatgctgtgctgcatgacttcatgctgctcctgcctgaagggctgctgcagctgcggatcttgctgcaagttcgacgaggacgactctgaacccgtcctgaagggcgtgaagctgcactacacctaa

SEQ ID NO: 48 - protein, 942 aa, synthetic construct
  REGION 1..942: note = RECOMBINANT SPIKE PROTEIN
ITNLCPFGEVFNATRFASVYAWNRKRISNCVADYSVLYNSASFSTFKCYGVSPTKLNDLCFTNVYADSFVIRGDEVRQIAPGQTGKIADYNYKLPDDFTGCVIAWNSNNLDSKVGGNYNYLYRLFRKSNLKPFERDISTEIYQAGSTPCNGVEGFNCYFPLQSYGFQPTNGVGYQPYRVVVLSFELLHAPATVCGPKKSTNLVKNKCVNFNFNGLTGTGVLTESNKKFLPFQQFGRDIADTTDAVRDPQTLEILDITPCSFGGVSVITPGTNTSNQVAVLYQDVNCTEVPVAIHADQLTPTWRVYSTGSNVFQTRAGCLIGAEHVNNSYECDIPIGAGICASYQTQTNSPRRARSVASQSIIAYTMSLGAENSVAYSNNSIAIPTNFTISVTTEILPVSMTKTSVDCTMYICGDSTECSNLLLQYGSFCTQLNRALTGIAVEQDKNTQEVFAQVKQIYKTPPIKDFGGFNFSQILPDPSKPSKRSFIEDLLFNKVTLADAGFIKQYGDCLGDIAARDLICAQKFNGLTVLPPLLTDEMIAQYTSALLAGTITSGWTFGAGAALQIPFAMQMAYRFNGIGVTQNVLYENQKLIANQFNSAIGKIQDSLSSTASALGKLQDVVNQNAQALNTLVKQLSSNFGAISSVLNDILSRLDKVEAEVQIDRLITGRLQSLQTYVTQQLIRAAEIRASANLAATKMSECVLGQSKRVDFCGKGYHLMSFPQSAPHGVVFLHVTYVPAQEKNFTTAPAICHDGKAHFPREGVFVSNGTHWFVTQRNFYEPQIITTDNTFVSGNCDVVIGIVNNTVYDPLQPELDSFKEELDKYFKNHTSPDVDLGDISGINASVVNIQKEIDRLNEVAKNLNESLIDLQELGKYEQYIKWPWYIWLGFIAGLIAIVMVTIMLCCMTSCCSCLKGCCSCGSCCKFDEDDSEPVLKGVKLHYT

SEQ ID NO: 49 - protein, 960 aa, synthetic construct
  REGION 1..960: note = RECOMBINANT SPIKE PROTEIN
MFVFLVLLPLVSSITNLCPFGEVFNATRFASVYAWNRKRISNCVADYSVLYNSASFSTFKCYGVSPTKLNDLCFTNVYADSFVIRGDEVRQIAPGQTGKIADYNYKLPDDFTGCVIAWNSNNLDSKVGGNYNYLYRLFRKSNLKPFERDISTEIYQAGSTPCNGVEGFNCYFPLQSYGFQPTNGVGYQPYRVVVLSFELLHAPATVCGPKKSTNLVKNKCVNFNFNGLTGTGVLTESNKKFLPFQQFGRDIADTTDAVRDPQTLEILDITPCSFGGVSVITPGTNTSNQVAVLYQDVNCTEVPVAIHADQLTPTWRVYSTGSNVFQTRAGCLIGAEHVNNSYECDIPIGAGICASYQTQTNSPRRARSVASQSIIAYTMSLGAENSVAYSNNSIAIPTNFTISVTTEILPVSMTKTSVDCTMYICGDSTECSNLLLQYGSFCTQLNRALTGIAVEQDKNTQEVFAQVKQIYKTPPIKDFGGFNFSQILPDPSKPSKRSFIEDLLFNKVTLADAGFIKQYGDCLGDIAARDLICAQKFNGLTVLPPLLTDEMIAQYTSALLAGTITSGWTFGAGAALQIPFAMQMAYRFNGIGVTQNVLYENQKLIANQFNSAIGKIQDSLSSTASALGKLQDVVNQNAQALNTLVKQLSSNFGAISSVLNDILSRLDKVEAEVQIDRLITGRLQSLQTYVTQQLIRAAEIRASANLAATKMSECVLGQSKRVDFCGKGYHLMSFPQSAPHGVVFLHVTYVPAQEKNFTTAPAICHDGKAHFPREGVFVSNGTHWFVTQRNFYEPQIITTDNTFVSGNCDVVIGIVNNTVYDPLQPELDSFKEELDKYFKNHTSPDVDLGDISGINASVVNIQKEIDRLNEVAKNLNESLIDLQELGKYEQYIKWPWYIWLGFIAGLIAIVMVTIMLCCMTSCCSCLKGCCSCGSCCKFDEDDSEPVLKGVKLHYTHHHHH

SEQ ID NO: 50 - DNA, 2883 bp, synthetic construct
  misc_feature 1..2883: note = RECOMBINANT SPIKE PROTEIN
  source 1..2883: mol_type = other DNA
atgttcgtcttcctggtgctgctgcccctggtgtccagcatcactaacctgtgccccttcggagaggtcttcaacgccacccgcttcgcttccgtgtacgcctggaacaggaagagaatctcaaactgcgtcgctgactactccgtgctgtacaactcagcctccttcagcaccttcaagtgctacggcgtgtcaccaactaagctgaacgacctgtgcttcaccaacgtctacgccgactccttcgtgatcaggggagacgaggtcagacagatcgctcctggccagactggaaagatcgccgactacaactacaagctgcccgacgacttcaccggttgcgtcatcgcttggaacagcaacaacctggactctaaagtgggtggcaactacaactacctgtaccgcctgttccgtaagtcaaacctgaagccattcgagagggacatcagcactgaaatctaccaggccggatctaccccttgcaacggtgtcgagggcttcaactgctacttccccctgcagtcctacggtttccagccaactaacggtgtgggctaccagccttacagagtggtcgtgctgagcttcgaactgctccacgctcctgctactgtgtgcggtccaaagaagtctaccaacctggtcaagaacaagtgcgtgaacttcaacttcaacggcctgaccggaactggtgtcctgaccgagagcaacaagaagttcctgcccttccagcagttcggaagggacatcgctgacaccactgacgctgtgcgcgaccctcagaccctggaaatcctggacatcactccatgctcattcggaggtgtctccgtgatcacccctggcaccaacacttctaaccaggtcgctgtgctgtaccaggacgtcaactgcaccgaggtccctgtggccatccacgctgaccagctgacccccacttggcgcgtgtactccaccggcagcaacgtgttccagactcgtgctggttgcctgatcggcgccgagcacgtgaacaacagctacgaatgcgacatccccatcggcgctggaatctgcgcctcttaccagacccagactaacagcccacgcagggctcgctctgtggcctctcagtcaatcatcgcttacaccatgtcactgggcgctgaaaactccgtggcctactctaacaactcaatcgccatccccaccaacttcactatcagcgtgaccactgagatcctgccagtcagcatgaccaagacttctgtggactgcactatgtacatctgcggagacagcaccgaatgctctaacctgctgctgcagtacggctctttctgcacccagctgaaccgtgctctgactggaatcgccgtggagcaggacaagaacactcaggaagtcttcgctcaggtgaagcaaatctacaagaccccacctatcaaggacttcggcggattcaacttctcccagatcctgcctgacccctccaagccaagcaagcgctctttcatcgaggacctgctgttcaacaaggtcactctggccgacgctggattcatcaagcagtacggagactgcctgggtgacatcgccgctcgtgacctgatctgcgctcagaagttcaacggtctgaccgtgctgcccccactgctgactgacgaaatgatcgcccagtacactagcgccctgctggctggaaccatcacttctggttggaccttcggtgctggcgccgctctgcagatccctttcgctatgcagatggcctaccgtttcaacggaatcggtgtcacccagaacgtgctgtacgagaaccagaagctgatcgctaaccagttcaactcagccatcggaaagatccaggacagcctgagctctactgcctctgctctgggcaagctgcaggacgtcgtgaaccagaacgcccaggctctgaacaccctggtcaagcagctgtcatccaacttcggtgctatcagctctgtgctgaacgacatcctgtcccgcctggacaaggtcgaggccgaagtgcagatcgaccgcctgatcactggccgtctgcagtcactgcagacctacgtgactcagcagctgatcagggccgctgaaatcagagcctccgctaacctggccgctaccaagatgagcgagtgcgtcctgggtcaatctaagcgtgtggacttctgcggcaagggataccacctgatgtcattccctcagtctgctccccacggtgtggtgttcctgcacgtcacctacgtgccagcccaggagaagaacttcaccactgcccctgctatctgccacgacggcaaggctcacttccccagggaaggtgtcttcgtgagcaacggcacccactggttcgtcactcagagaaacttctacgagccacagatcatcaccactgacaacactttcgtgtctggaaactgcgacgtggtcatcggtatcgtcaacaacaccgtgtacgaccccctgcagccagagctggactcattcaaggaggaactggacaagtacttcaagaaccacacctcccctgacgtcgacctgggcgacatctcaggaatcaacgcttccgtcgtgaacatccagaaggagatcgaccgcctgaacgaagtggccaagaacctgaacgaaagcctgatcgacctgcaggagctgggcaagtacgaacagtacatcaagtggccttggtacatctggctgggtttcatcgctggcctcatcgctatcgtgatggtgaccatcatgctgtgctgcatgacttcatgctgctcctgcctgaagggctgctgcagctgcggatcttgctgcaagttcgacgaggacgactctgaacccgtcctgaagggcgtgaagctgcactacacccaccaccaccaccaccac

SEQ ID NO: 51 - protein, 947 aa, synthetic construct
  REGION 1..947: note = RECOMBINANT SPIKE PROTEIN
ITNLCPFGEVFNATRFASVYAWNRKRISNCVADYSVLYNSASFSTFKCYGVSPTKLNDLCFTNVYADSFVIRGDEVRQIAPGQTGKIADYNYKLPDDFTGCVIAWNSNNLDSKVGGNYNYLYRLFRKSNLKPFERDISTEIYQAGSTPCNGVEGFNCYFPLQSYGFQPTNGVGYQPYRVVVLSFELLHAPATVCGPKKSTNLVKNKCVNFNFNGLTGTGVLTESNKKFLPFQQFGRDIADTTDAVRDPQTLEILDITPCSFGGVSVITPGTNTSNQVAVLYQDVNCTEVPVAIHADQLTPTWRVYSTGSNVFQTRAGCLIGAEHVNNSYECDIPIGAGICASYQTQTNSPRRARSVASQSIIAYTMSLGAENSVAYSNNSIAIPTNFTISVTTEILPVSMTKTSVDCTMYICGDSTECSNLLLQYGSFCTQLNRALTGIAVEQDKNTQEVFAQVKQIYKTPPIKDFGGFNFSQILPDPSKPSKRSFIEDLLFNKVTLADAGFIKQYGDCLGDIAARDLICAQKFNGLTVLPPLLTDEMIAQYTSALLAGTITSGWTFGAGAALQIPFAMQMAYRFNGIGVTQNVLYENQKLIANQFNSAIGKIQDSLSSTASALGKLQDVVNQNAQALNTLVKQLSSNFGAISSVLNDILSRLDKVEAEVQIDRLITGRLQSLQTYVTQQLIRAAEIRASANLAATKMSECVLGQSKRVDFCGKGYHLMSFPQSAPHGVVFLHVTYVPAQEKNFTTAPAICHDGKAHFPREGVFVSNGTHWFVTQRNFYEPQIITTDNTFVSGNCDVVIGIVNNTVYDPLQPELDSFKEELDKYFKNHTSPDVDLGDISGINASVVNIQKEIDRLNEVAKNLNESLIDLQELGKYEQYIKWPWYIWLGFIAGLIAIVMVTIMLCCMTSCCSCLKGCCSCGSCCKFDEDDSEPVLKGVKLHYTHHHHH

SEQ ID NO: 52 - protein, 901 aa, synthetic construct
  REGION 1..901: note = RECOMBINANT SPIKE PROTEIN
MFVFLVLLPLVSSITNLCPFGEVFNATRFASVYAWNRKRISNCVADYSVLYNSASFSTFKCYGVSPTKLNDLCFTNVYADSFVIRGDEVRQIAPGQTGKIADYNYKLPDDFTGCVIAWNSNNLDSKVGGNYNYLYRLFRKSNLKPFERDISTEIYQAGSTPCNGVEGFNCYFPLQSYGFQPTNGVGYQPYRVVVLSFELLHAPATVCGPKKSTNLVKNKCVNFNFNGLTGTGVLTESNKKFLPFQQFGRDIADTTDAVRDPQTLEILDITPCSFGGVSVITPGTNTSNQVAVLYQDVNCTEVPVAIHADQLTPTWRVYSTGSNVFQTRAGCLIGAEHVNNSYECDIPIGAGICASYQTQTNSPRRARSVASQSIIAYTMSLGAENSVAYSNNSIAIPTNFTISVTTEILPVSMTKTSVDCTMYICGDSTECSNLLLQYGSFCTQLNRALTGIAVEQDKNTQEVFAQVKQIYKTPPIKDFGGFNFSQILPDPSKPSKRSFIEDLLFNKVTLADAGFIKQYGDCLGDIAARDLICAQKFNGLTVLPPLLTDEMIAQYTSALLAGTITSGWTFGAGAALQIPFAMQMAYRFNGIGVTQNVLYENQKLIANQFNSAIGKIQDSLSSTASALGKLQDVVNQNAQALNTLVKQLSSNFGAISSVLNDILSRLDKVEAEVQIDRLITGRLQSLQTYVTQQLIRAAEIRASANLAATKMSECVLGQSKRVDFCGKGYHLMSFPQSAPHGVVFLHVTYVPAQEKNFTTAPAICHDGKAHFPREGVFVSNGTHWFVTQRNFYEPQIITTDNTFVSGNCDVVIGIVNNTVYDPLQPELDSFKEELDKYFKNHTSPDVDLGDISGINASVVNIQKEIDRLNEVAKNLNESLIDLQELGKYEQYIKWPHHHHHH

SEQ ID NO: 53 - DNA, 2706 bp, synthetic construct
  misc_feature 1..2706: note = RECOMBINANT SPIKE PROTEIN
  source 1..2706: mol_type = other DNA
atgttcgtcttcctggtgctgctgcccctggtgtccagcatcactaacctgtgccccttcggagaggtcttcaacgccacccgcttcgcttccgtgtacgcctggaacaggaagagaatctcaaactgcgtcgctgactactccgtgctgtacaactcagcctccttcagcaccttcaagtgctacggcgtgtcaccaactaagctgaacgacctgtgcttcaccaacgtctacgccgactccttcgtgatcaggggagacgaggtcagacagatcgctcctggccagactggaaagatcgccgactacaactacaagctgcccgacgacttcaccggttgcgtcatcgcttggaacagcaacaacctggactctaaagtgggtggcaactacaactacctgtaccgcctgttccgtaagtcaaacctgaagccattcgagagggacatcagcactgaaatctaccaggccggatctaccccttgcaacggtgtcgagggcttcaactgctacttccccctgcagtcctacggtttccagccaactaacggtgtgggctaccagccttacagagtggtcgtgctgagcttcgaactgctccacgctcctgctactgtgtgcggtccaaagaagtctaccaacctggtcaagaacaagtgcgtgaacttcaacttcaacggcctgaccggaactggtgtcctgaccgagagcaacaagaagttcctgcccttccagcagttcggaagggacatcgctgacaccactgacgctgtgcgcgaccctcagaccctggaaatcctggacatcactccatgctcattcggaggtgtctccgtgatcacccctggcaccaacacttctaaccaggtcgctgtgctgtaccaggacgtcaactgcaccgaggtccctgtggccatccacgctgaccagctgacccccacttggcgcgtgtactccaccggcagcaacgtgttccagactcgtgctggttgcctgatcggcgccgagcacgtgaacaacagctacgaatgcgacatccccatcggcgctggaatctgcgcctcttaccagacccagactaacagcccacgcagggctcgctctgtggcctctcagtcaatcatcgcttacaccatgtcactgggcgctgaaaactccgtggcctactctaacaactcaatcgccatccccaccaacttcactatcagcgtgaccactgagatcctgccagtcagcatgaccaagacttctgtggactgcactatgtacatctgcggagacagcaccgaatgctctaacctgctgctgcagtacggctctttctgcacccagctgaaccgtgctctgactggaatcgccgtggagcaggacaagaacactcaggaagtcttcgctcaggtgaagcaaatctacaagaccccacctatcaaggacttcggcggattcaacttctcccagatcctgcctgacccctccaagccaagcaagcgctctttcatcgaggacctgctgttcaacaaggtcactctggccgacgctggattcatcaagcagtacggagactgcctgggtgacatcgccgctcgtgacctgatctgcgctcagaagttcaacggtctgaccgtgctgcccccactgctgactgacgaaatgatcgcccagtacactagcgccctgctggctggaaccatcacttctggttggaccttcggtgctggcgccgctctgcagatccctttcgctatgcagatggcctaccgtttcaacggaatcggtgtcacccagaacgtgctgtacgagaaccagaagctgatcgctaaccagttcaactcagccatcggaaagatccaggacagcctgagctctactgcctctgctctgggcaagctgcaggacgtcgtgaaccagaacgcccaggctctgaacaccctggtcaagcagctgtcatccaacttcggtgctatcagctctgtgctgaacgacatcctgtcccgcctggacaaggtcgaggccgaagtgcagatcgaccgcctgatcactggccgtctgcagtcactgcagacctacgtgactcagcagctgatcagggccgctgaaatcagagcctccgctaacctggccgctaccaagatgagcgagtgcgtcctgggtcaatctaagcgtgtggacttctgcggcaagggataccacctgatgtcattccctcagtctgctccccacggtgtggtgttcctgcacgtcacctacgtgccagcccaggagaagaacttcaccactgcccctgctatctgccacgacggcaaggctcacttccccagggaaggtgtcttcgtgagcaacggcacccactggttcgtcactcagagaaacttctacgagccacagatcatcaccactgacaacactttcgtgtctggaaactgcgacgtggtcatcggtatcgtcaacaacaccgtgtacgaccccctgcagccagagctggactcattcaaggaggaactggacaagtacttcaagaaccacacctcccctgacgtcgacctgggcgacatctcaggaatcaacgcttccgtcgtgaacatccagaaggagatcgaccgcctgaacgaagtggccaagaacctgaacgaaagcctgatcgacctgcaggagctgggcaagtacgaacagtacatcaagtggcctcaccaccaccaccaccaccac

SEQ ID NO: 54 - protein, 888 aa, synthetic construct
  REGION 1..888: note = RECOMBINANT SPIKE PROTEIN
ITNLCPFGEVFNATRFASVYAWNRKRISNCVADYSVLYNSASFSTFKCYGVSPTKLNDLCFTNVYADSFVIRGDEVRQIAPGQTGKIADYNYKLPDDFTGCVIAWNSNNLDSKVGGNYNYLYRLFRKSNLKPFERDISTEIYQAGSTPCNGVEGFNCYFPLQSYGFQPTNGVGYQPYRVVVLSFELLHAPATVCGPKKSTNLVKNKCVNFNFNGLTGTGVLTESNKKFLPFQQFGRDIADTTDAVRDPQTLEILDITPCSFGGVSVITPGTNTSNQVAVLYQDVNCTEVPVAIHADQLTPTWRVYSTGSNVFQTRAGCLIGAEHVNNSYECDIPIGAGICASYQTQTNSPRRARSVASQSIIAYTMSLGAENSVAYSNNSIAIPTNFTISVTTEILPVSMTKTSVDCTMYICGDSTECSNLLLQYGSFCTQLNRALTGIAVEQDKNTQEVFAQVKQIYKTPPIKDFGGFNFSQILPDPSKPSKRSFIEDLLFNKVTLADAGFIKQYGDCLGDIAARDLICAQKFNGLTVLPPLLTDEMIAQYTSALLAGTITSGWTFGAGAALQIPFAMQMAYRFNGIGVTQNVLYENQKLIANQFNSAIGKIQDSLSSTASALGKLQDVVNQNAQALNTLVKQLSSNFGAISSVLNDILSRLDKVEAEVQIDRLITGRLQSLQTYVTQQLIRAAEIRASANLAATKMSECVLGQSKRVDFCGKGYHLMSFPQSAPHGVVFLHVTYVPAQEKNFTTAPAICHDGKAHFPREGVFVSNGTHWFVTQRNFYEPQIITTDNTFVSGNCDVVIGIVNNTVYDPLQPELDSFKEELDKYFKNHTSPDVDLGDISGINASVVNIQKEIDRLNEVAKNLNESLIDLQELGKYEQYIKWPHHHHHH

SEQ ID NO: 55 - DNA, 3819 bp, synthetic construct
  misc_feature 1..3819: note = RECOMBINANT SPIKE PROTEIN
  source 1..3819: mol_type = other DNA
atgttcgtcttcctggtgctgctgcccctggtgtccagccagtgcgtgaacctgaccactaggactcagctgcctcccgcttacaccaactcattcactcgcggtgtgtactaccctgacaaggtcttccgttcttcagtgctgcactcaactcaggacctgttcctgcccttcttctccaacgtcacctggttccacgccatccacgtgtccggcaccaacggcactaagcgcttcgacaacccagtgctgcctttcaacgacggtgtctacttcgcttcaaccgagaagtccaacatcatccgtggatggatcttcggcaccactctggacagcaagactcagtctctgctgatcgtcaacaacgccaccaacgtggtcatcaaggtctgcgaattccagttctgcaacgacccattcctgggcgtctactaccacaagaacaacaagtcatggatggagtccgaattccgcgtctactccagcgctaacaactgcactttcgagtacgtgtcccagcctttcctgatggacctggaaggaaagcagggtaacttcaagaacctgagggagttcgtgttcaagaacatcgacggatacttcaagatttacagcaagcacaccccaatcaacctggtgcgcgacctgcctcagggtttctctgctctggagccactggtggacctgcctatcggcatcaacatcacccgcttccagactctgctggctctgcaccgttcctacctgactccaggcgactcatcttctggatggactgctggagctgctgcttactacgtgggctacctgcagcctcgcaccttcctgctgaagtacaacgaaaacggaaccatcactgacgccgtcgactgcgctctggaccctctgtcagaaaccaagtgcactctgaagtccttcaccgtggagaagggcatctaccagacttcaaacttcagggtgcagcccaccgaatccatcgtcagattccctaacatcactaacctgtgccccttcggagaggtcttcaacgccacccgcttcgcttccgtgtacgcctggaacaggaagagaatctcaaactgcgtcgctgactactccgtgctgtacaactcagcctccttcagcaccttcaagtgctacggcgtgtcaccaactaagctgaacgacctgtgcttcaccaacgtctacgccgactccttcgtgatcaggggagacgaggtcagacagatcgctcctggccagactggaaagatcgccgactacaactacaagctgcccgacgacttcaccggttgcgtcatcgcttggaacagcaacaacctggactctaaagtgggtggcaactacaactacctgtaccgcctgttccgtaagtcaaacctgaagccattcgagagggacatcagcactgaaatctaccaggccggatctaccccttgcaacggtgtcgagggcttcaactgctacttccccctgcagtcctacggtttccagccaactaacggtgtgggctaccagccttacagagtggtcgtgctgagcttcgaactgctccacgctcctgctactgtgtgcggtccaaagaagtctaccaacctggtcaagaacaagtgcgtgaacttcaacttcaacggcctgaccggaactggtgtcctgaccgagagcaacaagaagttcctgcccttccagcagttcggaagggacatcgctgacaccactgacgctgtgcgcgaccctcagaccctggaaatcctggacatcactccatgctcattcggaggtgtctccgtgatcacccctggcaccaacacttctaaccaggtcgctgtgctgtaccaggacgtcaactgcaccgaggtccctgtggccatccacgctgaccagctgacccccacttggcgcgtgtactccaccggcagcaacgtgttccagactcgtgctggttgcctgatcggcgccgagcacgtgaacaacagctacgaatgcgacatccccatcggcgctggaatctgcgcctcttaccagacccagactaacagcccacagcaggctcagtctgtggcctctcagtcaatcatcgcttacaccatgtcactgggcgctgaaaactccgtggcctactctaacaactcaatcgccatccccaccaacttcactatcagcgtgaccactgagatcctgccagtcagcatgaccaagacttctgtggactgcactatgtacatctgcggagacagcaccgaatgctctaacctgctgctgcagtacggctctttctgcacccagctgaaccgtgctctgactggaatcgccgtggagcaggacaagaacactcaggaagtcttcgctcaggtgaagcaaatctacaagaccccacctatcaaggacttcggcggattcaacttctcccagatcctgcctgacccctccaagccaagcaagcgctctttcatcgaggacctgctgttcaacaaggtcactctggccgacgctggattcatcaagcagtacggagactgcctgggtgacatcgccgctcgtgacctgatctgcgctcagaagttcaacggtctgaccgtgctgcccccactgctgactgacgaaatgatcgcccagtacactagcgccctgctggctggaaccatcacttctggttggaccttcggtgctggcgccgctctgcagatccctttcgctatgcagatggcctaccgtttcaacggaatcggtgtcacccagaacgtgctgtacgagaaccagaagctgatcgctaaccagttcaactcagccatcggaaagatccaggacagcctgagctctactgcctctgctctgggcaagctgcaggacgtcgtgaaccagaacgcccaggctctgaacaccctggtcaagcagctgtcatccaacttcggtgctatcagctctgtgctgaacgacatcctgtcccgcctggacaaggtcgaggccgaagtgcagatcgaccgcctgatcactggccgtctgcagtcactgcagacctacgtgactcagcagctgatcagggccgctgaaatcagagcctccgctaacctggccgctaccaagatgagcgagtgcgtcctgggtcaatctaagcgtgtggacttctgcggcaagggataccacctgatgtcattccctcagtctgctccccacggtgtggtgttcctgcacgtcacctacgtgccagcccaggagaagaacttcaccactgcccctgctatctgccacgacggcaaggctcacttccccagggaaggtgtcttcgtgagcaacggcacccactggttcgtcactcagagaaacttctacgagccacagatcatcaccactgacaacactttcgtgtctggaaactgcgacgtggtcatcggtatcgtcaacaacaccgtgtacgaccccctgcagccagagctggactcattcaaggaggaactggacaagtacttcaagaaccacacctcccctgacgtcgacctgggcgacatctcaggaatcaacgcttccgtcgtgaacatccagaaggagatcgaccgcctgaacgaagtggccaagaacctgaacgaaagcctgatcgacctgcaggagctgggcaagtacgaacagtacatcaagtggccttggtacatctggctgggtttcatcgctggcctcatcgctatcgtgatggtgaccatcatgctgtgctgcatgacttcatgctgctcctgcctgaagggctgctgcagctgcggatcttgctgcaagttcgacgaggacgactctgaacccgtcctgaagggcgtgaagctgcactacacc

SEQ ID NO: 56 - protein, 1279 aa, synthetic construct
  REGION 1..1279: note = RECOMBINANT SPIKE PROTEIN
MFVFLVLLPLVSSQCVNLTTRTQLPPAYTNSFTRGVYYPDKVFRSSVLHSTQDLFLPFFSNVTWFHAIHVSGTNGTKRFDNPVLPFNDGVYFASTEKSNIIRGWIFGTTLDSKTQSLLIVNNATNVVIKVCEFQFCNDPFLGVYYHKNNKSWMESEFRVYSSANNCTFEYVSQPFLMDLEGKQGNFKNLREFVFKNIDGYFKIYSKHTPINLVRDLPQGFSALEPLVDLPIGINITRFQTLLALHRSYLTPGDSSSGWTAGAAAYYVGYLQPRTFLLKYNENGTITDAVDCALDPLSETKCTLKSFTVEKGIYQTSNFRVQPTESIVRFPNITNLCPFGEVFNATRFASVYAWNRKRISNCVADYSVLYNSASFSTFKCYGVSPTKLNDLCFTNVYADSFVIRGDEVRQIAPGQTGKIADYNYKLPDDFTGCVIAWNSNNLDSKVGGNYNYLYRLFRKSNLKPFERDISTEIYQAGSTPCNGVEGFNCYFPLQSYGFQPTNGVGYQPYRVVVLSFELLHAPATVCGPKKSTNLVKNKCVNFNFNGLTGTGVLTESNKKFLPFQQFGRDIADTTDAVRDPQTLEILDITPCSFGGVSVITPGTNTSNQVAVLYQDVNCTEVPVAIHADQLTPTWRVYSTGSNVFQTRAGCLIGAEHVNNSYECDIPIGAGICASYQTQTNSPQQAQSVASQSIIAYTMSLGAENSVAYSNNSIAIPTNFTISVTTEILPVSMTKTSVDCTMYICGDSTECSNLLLQYGSFCTQLNRALTGIAVEQDKNTQEVFAQVKQIYKTPPIKDFGGFNFSQILPDPSKPSKRSFIEDLLFNKVTLADAGFIKQYGDCLGDIAARDLICAQKFNGLTVLPPLLTDEMIAQYTSALLAGTITSGWTFGAGAALQIPFAMQMAYRFNGIGVTQNVLYENQKLIANQFNSAIGKIQDSLSSTASALGKLQDVVNQNAQALNTLVKQLSSNFGAISSVLNDILSRLDKVEAEVQIDRLITGRLQSLQTYVTQQLIRAAEIRASANLAATKMSECVLGQSKRVDFCGKGYHLMSFPQSAPHGVVFLHVTYVPAQEKNFTTAPAICHDGKAHFPREGVFVSNGTHWFVTQRNFYEPQIITTDNTFVSGNCDVVIGIVNNTVYDPLQPELDSFKEELDKYFKNHTSPDVDLGDISGINASVVNIQKEIDRLNEVAKNLNESLIDLQELGKYEQYIKWPWYIWLGFIAGLIAIVMVTIMLCCMTSCCSCLKGCCSCGSCCKFDEDDSEPVLKGVKLHYTHHHHHH

SEQ ID NO: 57 - DNA, 3837 bp, synthetic construct
  misc_feature 1..3837: note = RECOMBINANT SPIKE PROTEIN
  source 1..3837: mol_type = other DNA
atgttcgtcttcctggtgctgctgcccctggtgtccagccagtgcgtgaacctgaccactaggactcagctgcctcccgcttacaccaactcattcactcgcggtgtgtactaccctgacaaggtcttccgttcttcagtgctgcactcaactcaggacctgttcctgcccttcttctccaacgtcacctggttccacgccatccacgtgtccggcaccaacggcactaagcgcttcgacaacccagtgctgcctttcaacgacggtgtctacttcgcttcaaccgagaagtccaacatcatccgtggatggatcttcggcaccactctggacagcaagactcagtctctgctgatcgtcaacaacgccaccaacgtggtcatcaaggtctgcgaattccagttctgcaacgacccattcctgggcgtctactaccacaagaacaacaagtcatggatggagtccgaattccgcgtctactccagcgctaacaactgcactttcgagtacgtgtcccagcctttcctgatggacctggaaggaaagcagggtaacttcaagaacctgagggagttcgtgttcaagaacatcgacggatacttcaagatttacagcaagcacaccccaatcaacctggtgcgcgacctgcctcagggtttctctgctctggagccactggtggacctgcctatcggcatcaacatcacccgcttccagactctgctggctctgcaccgttcctacctgactccaggcgactcatcttctggatggactgctggagctgctgcttactacgtgggctacctgcagcctcgcaccttcctgctgaagtacaacgaaaacggaaccatcactgacgccgtcgactgcgctctggaccctctgtcagaaaccaagtgcactctgaagtccttcaccgtggagaagggcatctaccagacttcaaacttcagggtgcagcccaccgaatccatcgtcagattccctaacatcactaacctgtgccccttcggagaggtcttcaacgccacccgcttcgcttccgtgtacgcctggaacaggaagagaatctcaaactgcgtcgctgactactccgtgctgtacaactcagcctccttcagcaccttcaagtgctacggcgtgtcaccaactaagctgaacgacctgtgcttcaccaacgtctacgccgactccttcgtgatcaggggagacgaggtcagacagatcgctcctggccagactggaaagatcgccgactacaactacaagctgcccgacgacttcaccggttgcgtcatcgcttggaacagcaacaacctggactctaaagtgggtggcaactacaactacctgtaccgcctgttccgtaagtcaaacctgaagccattcgagagggacatcagcactgaaatctaccaggccggatctaccccttgcaacggtgtcgagggcttcaactgctacttccccctgcagtcctacggtttccagccaactaacggtgtgggctaccagccttacagagtggtcgtgctgagcttcgaactgctccacgctcctgctactgtgtgcggtccaaagaagtctaccaacctggtcaagaacaagtgcgtgaacttcaacttcaacggcctgaccggaactggtgtcctgaccgagagcaacaagaagttcctgcccttccagcagttcggaagggacatcgctgacaccactgacgctgtgcgcgaccctcagaccctggaaatcctggacatcactccatgctcattcggaggtgtctccgtgatcacccctggcaccaacacttctaaccaggtcgctgtgctgtaccaggacgtcaactgcaccgaggtccctgtggccatccacgctgaccagctgacccccacttggcgcgtgtactccaccggcagcaacgtgttccagactcgtgctggttgcctgatcggcgccgagcacgtgaacaacagctacgaatgcgacatccccatcggcgctggaatctgcgcctcttaccagacccagactaacagcccacagcaggctcagtctgtggcctctcagtcaatcatcgcttacaccatgtcactgggcgctgaaaactccgtggcctactctaacaactcaatcgccatccccaccaacttcactatcagcgtgaccactgagatcctgccagtcagcatgaccaagacttctgtggactgcactatgtacatctgcggagacagcaccgaatgctctaacctgctgctgcagtacggctctttctgcacccagctgaaccgtgctctgactggaatcgccgtggagcaggacaagaacactcaggaagtcttcgctcaggtgaagcaaatctacaagaccccacctatcaaggacttcggcggattcaacttctcccagatcctgcctgacccctccaagccaagcaagcgctctttcatcgaggacctgctgttcaacaaggtcactctggccgacgctggattcatcaagcagtacggagactgcctgggtgacatcgccgctcgtgacctgatctgcgctcagaagttcaacggtctgaccgtgctgcccccactgctgactgacgaaatgatcgcccagtacactagcgccctgctggctggaaccatcacttctggttggaccttcggtgctggcgccgctctgcagatccctttcgctatgcagatggcctaccgtttcaacggaatcggtgtcacccagaacgtgctgtacgagaaccagaagctgatcgctaaccagttcaactcagccatcggaaagatccaggacagcctgagctctactgcctctgctctgggcaagctgcaggacgtcgtgaaccagaacgcccaggctctgaacaccctggtcaagcagctgtcatccaacttcggtgctatcagctctgtgctgaacgacatcctgtcccgcctggacaaggtcgaggccgaagtgcagatcgaccgcctgatcactggccgtctgcagtcactgcagacctacgtgactcagcagctgatcagggccgctgaaatcagagcctccgctaacctggccgctaccaagatgagcgagtgcgtcctgggtcaatctaagcgtgtggacttctgcggcaagggataccacctgatgtcattccctcagtctgctccccacggtgtggtgttcctgcacgtcacctacgtgccagcccaggagaagaacttcaccactgcccctgctatctgccacgacggcaaggctcacttccccagggaaggtgtcttcgtgagcaacggcacccactggttcgtcactcagagaaacttctacgagccacagatcatcaccactgacaacactttcgtgtctggaaactgcgacgtggtcatcggtatcgtcaacaacaccgtgtacgaccccctgcagccagagctggactcattcaaggaggaactggacaagtacttcaagaaccacacctcccctgacgtcgacctgggcgacatctcaggaatcaacgcttccgtcgtgaacatccagaaggagatcgaccgcctgaacgaagtggccaagaacctgaacgaaagcctgatcgacctgcaggagctgggcaagtacgaacagtacatcaagtggccttggtacatctggctgggtttcatcgctggcctcatcgctatcgtgatggtgaccatcatgctgtgctgcatgacttcatgctgctcctgcctgaagggctgctgcagctgcggatcttgctgcaagttcgacgaggacgactctgaacccgtcctgaagggcgtgaagctgcactacacccaccaccaccaccaccac

SEQ ID NO: 58 - protein, 1266 aa, synthetic construct
  REGION 1..1266: note = RECOMBINANT SPIKE PROTEIN
QCVNLTTRTQLPPAYTNSFTRGVYYPDKVFRSSVLHSTQDLFLPFFSNVTWFHAIHVSGTNGTKRFDNPVLPFNDGVYFASTEKSNIIRGWIFGTTLDSKTQSLLIVNNATNVVIKVCEFQFCNDPFLGVYYHKNNKSWMESEFRVYSSANNCTFEYVSQPFLMDLEGKQGNFKNLREFVFKNIDGYFKIYSKHTPINLVRDLPQGFSALEPLVDLPIGINITRFQTLLALHRSYLTPGDSSSGWTAGAAAYYVGYLQPRTFLLKYNENGTITDAVDCALDPLSETKCTLKSFTVEKGIYQTSNFRVQPTESIVRFPNITNLCPFGEVFNATRFASVYAWNRKRISNCVADYSVLYNSASFSTFKCYGVSPTKLNDLCFTNVYADSFVIRGDEVRQIAPGQTGKIADYNYKLPDDFTGCVIAWNSNNLDSKVGGNYNYLYRLFRKSNLKPFERDISTEIYQAGSTPCNGVEGFNCYFPLQSYGFQPTNGVGYQPYRVVVLSFELLHAPATVCGPKKSTNLVKNKCVNFNFNGLTGTGVLTESNKKFLPFQQFGRDIADTTDAVRDPQTLEILDITPCSFGGVSVITPGTNTSNQVAVLYQDVNCTEVPVAIHADQLTPTWRVYSTGSNVFQTRAGCLIGAEHVNNSYECDIPIGAGICASYQTQTNSPQQAQSVASQSIIAYTMSLGAENSVAYSNNSIAIPTNFTISVTTEILPVSMTKTSVDCTMYICGDSTECSNLLLQYGSFCTQLNRALTGIAVEQDKNTQEVFAQVKQIYKTPPIKDFGGFNFSQILPDPSKPSKRSFIEDLLFNKVTLADAGFIKQYGDCLGDIAARDLICAQKFNGLTVLPPLLTDEMIAQYTSALLAGTITSGWTFGAGAALQIPFAMQMAYRFNGIGVTQNVLYENQKLIANQFNSAIGKIQDSLSSTASALGKLQDVVNQNAQALNTLVKQLSSNFGAISSVLNDILSRLDKVEAEVQIDRLITGRLQSLQTYVTQQLIRAAEIRASANLAATKMSECVLGQSKRVDFCGKGYHLMSFPQSAPHGVVFLHVTYVPAQEKNFTTAPAICHDGKAHFPREGVFVSNGTHWFVTQRNFYEPQIITTDNTFVSGNCDVVIGIVNNTVYDPLQPELDSFKEELDKYFKNHTSPDVDLGDISGINASVVNIQKEIDRLNEVAKNLNESLIDLQELGKYEQYIKWPWYIWLGFIAGLIAIVMVTIMLCCMTSCCSCLKGCCSCGSCCKFDEDDSEPVLKGVKLHYTHHHHHH

SEQ ID NO: 59 - protein, 1219 aa, synthetic construct
  REGION 1..1219: note = RECOMBINANT SPIKE PROTEIN
MFVFLVLLPLVSSQCVNLTTRTQLPPAYTNSFTRGVYYPDKVFRSSVLHSTQDLFLPFFSNVTWFHAIHVSGTNGTKRFDNPVLPFNDGVYFASTEKSNIIRGWIFGTTLDSKTQSLLIVNNATNVVIKVCEFQFCNDPFLGVYYHKNNKSWMESEFRVYSSANNCTFEYVSQPFLMDLEGKQGNFKNLREFVFKNIDGYFKIYSKHTPINLVRDLPQGFSALEPLVDLPIGINITRFQTLLALHRSYLTPGDSSSGWTAGAAAYYVGYLQPRTFLLKYNENGTITDAVDCALDPLSETKCTLKSFTVEKGIYQTSNFRVQPTESIVRFPNITNLCPFGEVFNATRFASVYAWNRKRISNCVADYSVLYNSASFSTFKCYGVSPTKLNDLCFTNVYADSFVIRGDEVRQIAPGQTGKIADYNYKLPDDFTGCVIAWNSNNLDSKVGGNYNYLYRLFRKSNLKPFERDISTEIYQAGSTPCNGVEGFNCYFPLQSYGFQPTNGVGYQPYRVVVLSFELLHAPATVCGPKKSTNLVKNKCVNFNFNGLTGTGVLTESNKKFLPFQQFGRDIADTTDAVRDPQTLEILDITPCSFGGVSVITPGTNTSNQVAVLYQDVNCTEVPVAIHADQLTPTWRVYSTGSNVFQTRAGCLIGAEHVNNSYECDIPIGAGICASYQTQTNSPQQAQSVASQSIIAYTMSLGAENSVAYSNNSIAIPTNFTISVTTEILPVSMTKTSVDCTMYICGDSTECSNLLLQYGSFCTQLNRALTGIAVEQDKNTQEVFAQVKQIYKTPPIKDFGGFNFSQILPDPSKPSKRSFIEDLLFNKVTLADAGFIKQYGDCLGDIAARDLICAQKFNGLTVLPPLLTDEMIAQYTSALLAGTITSGWTFGAGAALQIPFAMQMAYRFNGIGVTQNVLYENQKLIANQFNSAIGKIQDSLSSTASALGKLQDVVNQNAQALNTLVKQLSSNFGAISSVLNDILSRLDKVEAEVQIDRLITGRLQSLQTYVTQQLIRAAEIRASANLAATKMSECVLGQSKRVDFCGKGYHLMSFPQSAPHGVVFLHVTYVPAQEKNFTTAPAICHDGKAHFPREGVFVSNGTHWFVTQRNFYEPQIITTDNTFVSGNCDVVIGIVNNTVYDPLQPELDSFKEELDKYFKNHTSPDVDLGDISGINASVVNIQKEIDRLNEVAKNLNESLIDLQELGKYEQYIKWPHHHHHH

SEQ ID NO: 60 - DNA, 3657 bp, synthetic construct
  misc_feature 1..3657: note = RECOMBINANT SPIKE PROTEIN
  source 1..3657: mol_type = other DNA
atgttcgtcttcctggtgctgctgcccctggtgtccagccagtgcgtgaacctgaccactaggactcagctgcctcccgcttacaccaactcattcactcgcggtgtgtactaccctgacaaggtcttccgttcttcagtgctgcactcaactcaggacctgttcctgcccttcttctccaacgtcacctggttccacgccatccacgtgtccggcaccaacggcactaagcgcttcgacaacccagtgctgcctttcaacgacggtgtctacttcgcttcaaccgagaagtccaacatcatccgtggatggatcttcggcaccactctggacagcaagactcagtctctgctgatcgtcaacaacgccaccaacgtggtcatcaaggtctgcgaattccagttctgcaacgacccattcctgggcgtctactaccacaagaacaacaagtcatggatggagtccgaattccgcgtctactccagcgctaacaactgcactttcgagtacgtgtcccagcctttcctgatggacctggaaggaaagcagggtaacttcaagaacctgagggagttcgtgttcaagaacatcgacggatacttcaagatttacagcaagcacaccccaatcaacctggtgcgcgacctgcctcagggtttctctgctctggagccactggtggacctgcctatcggcatcaacatcacccgcttccagactctgctggctctgcaccgttcctacctgactccaggcgactcatcttctggatggactgctggagctgctgcttactacgtgggctacctgcagcctcgcaccttcctgctgaagtacaacgaaaacggaaccatcactgacgccgtcgactgcgctctggaccctctgtcagaaaccaagtgcactctgaagtccttcaccgtggagaagggcatctaccagacttcaaacttcagggtgcagcccaccgaatccatcgtcagattccctaacatcactaacctgtgccccttcggagaggtcttcaacgccacccgcttcgcttccgtgtacgcctggaacaggaagagaatctcaaactgcgtcgctgactactccgtgctgtacaactcagcctccttcagcaccttcaagtgctacggcgtgtcaccaactaagctgaacgacctgtgcttcaccaacgtctacgccgactccttcgtgatcaggggagacgaggtcagacagatcgctcctggccagactggaaagatcgccgactacaactacaagctgcccgacgacttcaccggttgcgtcatcgcttggaacagcaacaacctggactctaaagtgggtggcaactacaactacctgtaccgcctgttccgtaagtcaaacctgaagccattcgagagggacatcagcactgaaatctaccaggccggatctaccccttgcaacggtgtcgagggcttcaactgctacttccccctgcagtcctacggtttccagccaactaacggtgtgggctaccagccttacagagtggtcgtgctgagcttcgaactgctccacgctcctgctactgtgtgcggtccaaagaagtctaccaacctggtcaagaacaagtgcgtgaacttcaacttcaacggcctgaccggaactggtgtcctgaccgagagcaacaagaagttcctgcccttccagcagttcggaagggacatcgctgacaccactgacgctgtgcgcgaccctcagaccctggaaatcctggacatcactccatgctcattcggaggtgtctccgtgatcacccctggcaccaacacttctaaccaggtcgctgtgctgtaccaggacgtcaactgcaccgaggtccctgtggccatccacgctgaccagctgacccccacttggcgcgtgtactccaccggcagcaacgtgttccagactcgtgctggttgcctgatcggcgccgagcacgtgaacaacagctacgaatgcgacatccccatcggcgctggaatctgcgcctcttaccagacccagactaacagcccacagcaggctcagtctgtggcctctcagtcaatcatcgcttacaccatgtcactgggcgctgaaaactccgtggcctactctaacaactcaatcgccatccccaccaacttcactatcagcgtgaccactgagatcctgccagtcagcatgaccaagacttctgtggactgcactatgtacatctgcggagacagcaccgaatgctctaacctgctgctgcagtacggctctttctgcacccagctgaaccgtgctctgactggaatcgccgtggagcaggacaagaacactcaggaagtcttcgctcaggtgaagcaaatctacaagaccccacctatcaaggacttcggcggattcaacttctcccagatcctgcctgacccctccaagccaagcaagcgctctttcatcgaggacctgctgttcaacaaggtcactctggccgacgctggattcatcaagcagtacggagactgcctgggtgacatcgccgctcgtgacctgatctgcgctcagaagttcaacggtctgaccgtgctgcccccactgctgactgacgaaatgatcgcccagtacactagcgccctgctggctggaaccatcacttctggttggaccttcggtgctggcgccgctctgcagatccctttcgctatgcagatggcctaccgtttcaacggaatcggtgtcacccagaacgtgctgtacgagaaccagaagctgatcgctaaccagttcaactcagccatcggaaagatccaggacagcctgagctctactgcctctgctctgggcaagctgcaggacgtcgtgaaccagaacgcccaggctctgaacaccctggtcaagcagctgtcatccaacttcggtgctatcagctctgtgctgaacgacatcctgtcccgcctggacaaggtcgaggccgaagtgcagatcgaccgcctgatcactggccgtctgcagtcactgcagacctacgtgactcagcagctgatcagggccgctgaaatcagagcctccgctaacctggccgctaccaagatgagcgagtgcgtcctgggtcaatctaagcgtgtggacttctgcggcaagggataccacctgatgtcattccctcagtctgctccccacggtgtggtgttcctgcacgtcacctacgtgccagcccaggagaagaacttcaccactgcccctgctatctgccacgacggcaaggctcacttccccagggaaggtgtcttcgtgagcaacggcacccactggttcgtcactcagagaaacttctacgagccacagatcatcaccactgacaacactttcgtgtctggaaactgcgacgtggtcatcggtatcgtcaacaacaccgtgtacgaccccctgcagccagagctggactcattcaaggaggaactggacaagtacttcaagaaccacacctcccctgacgtcgacctgggcgacatctcaggaatcaacgcttccgtcgtgaacatccagaaggagatcgaccgcctgaacgaagtggccaagaacctgaacgaaagcctgatcgacctgcaggagctgggcaagtacgaacagtacatcaagtggcctcaccaccaccaccaccac

SEQ ID NO: 61 - protein, 1205 aa, synthetic construct
  REGION 1..1205: note = RECOMBINANT SPIKE PROTEIN
CVNLTTRTQLPPAYTNSFTRGVYYPDKVFRSSVLHSTQDLFLPFFSNVTWFHAIHVSGTNGTKRFDNPVLPFNDGVYFASTEKSNIIRGWIFGTTLDSKTQSLLIVNNATNVVIKVCEFQFCNDPFLGVYYHKNNKSWMESEFRVYSSANNCTFEYVSQPFLMDLEGKQGNFKNLREFVFKNIDGYFKIYSKHTPINLVRDLPQGFSALEPLVDLPIGINITRFQTLLALHRSYLTPGDSSSGWTAGAAAYYVGYLQPRTFLLKYNENGTITDAVDCALDPLSETKCTLKSFTVEKGIYQTSNFRVQPTESIVRFPNITNLCPFGEVFNATRFASVYAWNRKRISNCVADYSVLYNSASFSTFKCYGVSPTKLNDLCFTNVYADSFVIRGDEVRQIAPGQTGKIADYNYKLPDDFTGCVIAWNSNNLDSKVGGNYNYLYRLFRKSNLKPFERDISTEIYQAGSTPCNGVEGFNCYFPLQSYGFQPTNGVGYQPYRVVVLSFELLHAPATVCGPKKSTNLVKNKCVNFNFNGLTGTGVLTESNKKFLPFQQFGRDIADTTDAVRDPQTLEILDITPCSFGGVSVITPGTNTSNQVAVLYQDVNCTEVPVAIHADQLTPTWRVYSTGSNVFQTRAGCLIGAEHVNNSYECDIPIGAGICASYQTQTNSPQQAQSVASQSIIAYTMSLGAENSVAYSNNSIAIPTNFTISVTTEILPVSMTKTSVDCTMYICGDSTECSNLLLQYGSFCTQLNRALTGIAVEQDKNTQEVFAQVKQIYKTPPIKDFGGFNFSQILPDPSKPSKRSFIEDLLFNKVTLADAGFIKQYGDCLGDIAARDLICAQKFNGLTVLPPLLTDEMIAQYTSALLAGTITSGWTFGAGAALQIPFAMQMAYRFNGIGVTQNVLYENQKLIANQFNSAIGKIQDSLSSTASALGKLQDVVNQNAQALNTLVKQLSSNFGAISSVLNDILSRLDKVEAEVQIDRLITGRLQSLQTYVTQQLIRAAEIRASANLAATKMSECVLGQSKRVDFCGKGYHLMSFPQSAPHGVVFLHVTYVPAQEKNFTTAPAICHDGKAHFPREGVFVSNGTHWFVTQRNFYEPQIITTDNTFVSGNCDVVIGIVNNTVYDPLQPELDSFKEELDKYFKNHTSPDVDLGDISGINASVVNIQKEIDRLNEVAKNLNESLIDLQELGKYEQYIKWPHHHHHH

SEQ ID NO: 62 - protein, 1263 aa, synthetic construct
  REGION 1..1263: note = RECOMBINANT SPIKE PROTEIN
MFVFLVLLPLVSSQCVNLTTRTQLPPAYTNSFTRGVYYPDKVFRSSVLHSTQDLFLPFFSNVTWFHAIHVSGTNGTKRFDNPVLPFNDGVYFASTEKSNIIRGWIFGTTLDSKTQSLLIVNNATNVVIKVCEFQFCNDPFLGVYYHKNNKSWMESEFRVYSSANNCTFEYVSQPFLMDLEGKQGNFKNLREFVFKNIDGYFKIYSKHTPINLVRDLPQGFSALEPLVDLPIGINITRFQTLLALHRSYLTPGDSSSGWTAGAAAYYVGYLQPRTFLLKYNENGTITDAVDCALDPLSETKCTLKSFTVEKGIYQTSNFRVQPTESIVRFPNITNLCPFGEVFNATRFASVYAWNRKRISNCVADYSVLYNSASFSTFKCYGVSPTKLNDLCFTNVYADSFVIRGDEVRQIAPGQTGKIADYNYKLPDDFTGCVIAWNSNNLDSKVGGNYNYLYRLFRKSNLKPFERDISTEIYQAGSTPCNGVEGFNCYFPLQSYGFQPTNGVGYQPYRVVVLSFELLHAPATVCGPKKSTNLVKNKCVNFNFNGLTGTGVLTESNKKFLPFQQFGRDIADTTDAVRDPQTLEILDITPCSFGGVSVITPGTNTSNQVAVLYQDVNCTEVPVAIHADQLTPTWRVYSTGSNVFQTRAGCLIGAEHVNNSYECDIPIGAGICASYQTQTNSPQQAQSVALGAENSVAYSNNSIAIPTNFTISVTTEILPVSMTKTSVDCTMYICGDSTECSNLLLQYGSFCTQLNRALTGIAVEQDKNTQEVFAQVKQIYKTPPIKDFGGFNFSQILPDPSKPSKRSFIEDLLFNKVTLADAGFIKQYGDCLGDIAARDLICAQKFNGLTVLPPLLTDEMIAQYTSALLAGTITSGWTFGAGAALQIPFAMQMAYRFNGIGVTQNVLYENQKLIANQFNSAIGKIQDSLSSTASALGKLQDVVNQNAQALNTLVKQLSSNFGAISSVLNDILSRLDKVEAEVQIDRLITGRLQSLQTYVTQQLIRAAEIRASANLAATKMSECVLGQSKRVDFCGKGYHLMSFPQSAPHGVVFLHVTYVPAQEKNFTTAPAICHDGKAHFPREGVFVSNGTHWFVTQRNFYEPQIITTDNTFVSGNCDVVIGIVNNTVYDPLQPELDSFKEELDKYFKNHTSPDVDLGDISGINASVVNIQKEIDRLNEVAKNLNESLIDLQELGKYEQYIKWPWYIWLGFIAGLIAIVMVTIMLCCMTSCCSCLKGCCSCGSCCKFDEDDSEPVLKGVKLHYT

SEQ ID NO: 63 - protein, 1250 aa, synthetic construct
  REGION 1..1250: note = RECOMBINANT SPIKE PROTEIN
QCVNLTTRTQLPPAYTNSFTRGVYYPDKVFRSSVLHSTQDLFLPFFSNVTWFHAIHVSGTNGTKRFDNPVLPFNDGVYFASTEKSNIIRGWIFGTTLDSKTQSLLIVNNATNVVIKVCEFQFCNDPFLGVYYHKNNKSWMESEFRVYSSANNCTFEYVSQPFLMDLEGKQGNFKNLREFVFKNIDGYFKIYSKHTPINLVRDLPQGFSALEPLVDLPIGINITRFQTLLALHRSYLTPGDSSSGWTAGAAAYYVGYLQPRTFLLKYNENGTITDAVDCALDPLSETKCTLKSFTVEKGIYQTSNFRVQPTESIVRFPNITNLCPFGEVFNATRFASVYAWNRKRISNCVADYSVLYNSASFSTFKCYGVSPTKLNDLCFTNVYADSFVIRGDEVRQIAPGQTGKIADYNYKLPDDFTGCVIAWNSNNLDSKVGGNYNYLYRLFRKSNLKPFERDISTEIYQAGSTPCNGVEGFNCYFPLQSYGFQPTNGVGYQPYRVVVLSFELLHAPATVCGPKKSTNLVKNKCVNFNFNGLTGTGVLTESNKKFLPFQQFGRDIADTTDAVRDPQTLEILDITPCSFGGVSVITPGTNTSNQVAVLYQDVNCTEVPVAIHADQLTPTWRVYSTGSNVFQTRAGCLIGAEHVNNSYECDIPIGAGICASYQTQTNSPQQAQSVALGAENSVAYSNNSIAIPTNFTISVTTEILPVSMTKTSVDCTMYICGDSTECSNLLLQYGSFCTQLNRALTGIAVEQDKNTQEVFAQVKQIYKTPPIKDFGGFNFSQILPDPSKPSKRSFIEDLLFNKVTLADAGFIKQYGDCLGDIAARDLICAQKFNGLTVLPPLLTDEMIAQYTSALLAGTITSGWTFGAGAALQIPFAMQMAYRFNGIGVTQNVLYENQKLIANQFNSAIGKIQDSLSSTASALGKLQDVVNQNAQALNTLVKQLSSNFGAISSVLNDILSRLDKVEAEVQIDRLITGRLQSLQTYVTQQLIRAAEIRASANLAATKMSECVLGQSKRVDFCGKGYHLMSFPQSAPHGVVFLHVTYVPAQEKNFTTAPAICHDGKAHFPREGVFVSNGTHWFVTQRNFYEPQIITTDNTFVSGNCDVVIGIVNNTVYDPLQPELDSFKEELDKYFKNHTSPDVDLGDISGINASVVNIQKEIDRLNEVAKNLNESLIDLQELGKYEQYIKWPWYIWLGFIAGLIAIVMVTIMLCCMTSCCSCLKGCCSCGSCCKFDEDDSEPVLKGVKLHYT

SEQ ID NO: 64 - protein, 1263 aa, synthetic construct
  REGION 1..1263: note = RECOMBINANT SPIKE PROTEIN
MFVFLVLLPLVSSQCVNLTTRTQLPPAYTNSFTRGVYYPDKVFRSSVLHSTQDLFLPFFSNVTWFHAIHVSGTNGTKRFDNPVLPFNDGVYFASTEKSNIIRGWIFGTTLDSKTQSLLIVNNATNVVIKVCEFQFCNDPFLGVYYHKNNKSWMESEFRVYSSANNCTFEYVSQPFLMDLEGKQGNFKNLREFVFKNIDGYFKIYSKHTPINLVRDLPQGFSALEPLVDLPIGINITRFQTLLALHRSYLTPGDSSSGWTAGAAAYYVGYLQPRTFLLKYNENGTITDAVDCALDPLSETKCTLKSFTVEKGIYQTSNFRVQPTESIVRFPNITNLCPFGEVFNATRFASVYAWNRKRISNCVADYSVLYNSASFSTFKCYGVSPTKLNDLCFTNVYADSFVIRGDEVRQIAPGQTGKIADYNYKLPDDFTGCVIAWNSNNLDSKVGGNYNYLYRLFRKSNLKPFERDISTEIYQAGSTPCNGVEGFNCYFPLQSYGFQPTNGVGYQPYRVVVLSFELLHAPATVCGPKKSTNLVKNKCVNFNFNGLTGTGVLTESNKKFLPFQQFGRDIADTTDAVRDPQTLEILDITPCSFGGVSVITPGTNTSNQVAVLYQDVNCTEVPVAIHADQLTPTWRVYSTGSNVFQTRAGCLIGAEHVNNSYECDIPIGAGICASYQTQTNSPQQAQSVASQSIIAYTMSLGAENSVAYSNNSIAIEILPVSMTKTSVDCTMYICGDSTECSNLLLQYGSFCTQLNRALTGIAVEQDKNTQEVFAQVKQIYKTPPIKDFGGFNFSQILPDPSKPSKRSFIEDLLFNKVTLADAGFIKQYGDCLGDIAARDLICAQKFNGLTVLPPLLTDEMIAQYTSALLAGTITSGWTFGAGAALQIPFAMQMAYRFNGIGVTQNVLYENQKLIANQFNSAIGKIQDSLSSTASALGKLQDVVNQNAQALNTLVKQLSSNFGAISSVLNDILSRLDKVEAEVQIDRLITGRLQSLQTYVTQQLIRAAEIRASANLAATKMSECVLGQSKRVDFCGKGYHLMSFPQSAPHGVVFLHVTYVPAQEKNFTTAPAICHDGKAHFPREGVFVSNGTHWFVTQRNFYEPQIITTDNTFVSGNCDVVIGIVNNTVYDPLQPELDSFKEELDKYFKNHTSPDVDLGDISGINASVVNIQKEIDRLNEVAKNLNESLIDLQELGKYEQYIKWPWYIWLGFIAGLIAIVMVTIMLCCMTSCCSCLKGCCSCGSCCKFDEDDSEPVLKGVKLHYT

SEQ ID NO: 65 - protein, 1250 aa, synthetic construct
  REGION 1..1250: note = RECOMBINANT SPIKE PROTEIN
QCVNLTTRTQLPPAYTNSFTRGVYYPDKVFRSSVLHSTQDLFLPFFSNVTWFHAIHVSGTNGTKRFDNPVLPFNDGVYFASTEKSNIIRGWIFGTTLDSKTQSLLIVNNATNVVIKVCEFQFCNDPFLGVYYHKNNKSWMESEFRVYSSANNCTFEYVSQPFLMDLEGKQGNFKNLREFVFKNIDGYFKIYSKHTPINLVRDLPQGFSALEPLVDLPIGINITRFQTLLALHRSYLTPGDSSSGWTAGAAAYYVGYLQPRTFLLKYNENGTITDAVDCALDPLSETKCTLKSFTVEKGIYQTSNFRVQPTESIVRFPNITNLCPFGEVFNATRFASVYAWNRKRISNCVADYSVLYNSASFSTFKCYGVSPTKLNDLCFTNVYADSFVIRGDEVRQIAPGQTGKIADYNYKLPDDFTGCVIAWNSNNLDSKVGGNYNYLYRLFRKSNLKPFERDISTEIYQAGSTPCNGVEGFNCYFPLQSYGFQPTNGVGYQPYRVVVLSFELLHAPATVCGPKKSTNLVKNKCVNFNFNGLTGTGVLTESNKKFLPFQQFGRDIADTTDAVRDPQTLEILDITPCSFGGVSVITPGTNTSNQVAVLYQDVNCTEVPVAIHADQLTPTWRVYSTGSNVFQTRAGCLIGAEHVNNSYECDIPIGAGICASYQTQTNSPQQAQSVASQSIIAYTMSLGAENSVAYSNNSIAIEILPVSMTKTSVDCTMYICGDSTECSNLLLQYGSFCTQLNRALTGIAVEQDKNTQEVFAQVKQIYKTPPIKDFGGFNFSQILPDPSKPSKRSFIEDLLFNKVTLADAGFIKQYGDCLGDIAARDLICAQKFNGLTVLPPLLTDEMIAQYTSALLAGTITSGWTFGAGAALQIPFAMQMAYRFNGIGVTQNVLYENQKLIANQFNSAIGKIQDSLSSTASALGKLQDVVNQNAQALNTLVKQLSSNFGAISSVLNDILSRLDKVEAEVQIDRLITGRLQSLQTYVTQQLIRAAEIRASANLAATKMSECVLGQSKRVDFCGKGYHLMSFPQSAPHGVVFLHVTYVPAQEKNFTTAPAICHDGKAHFPREGVFVSNGTHWFVTQRNFYEPQIITTDNTFVSGNCDVVIGIVNNTVYDPLQPELDSFKEELDKYFKNHTSPDVDLGDISGINASVVNIQKEIDRLNEVAKNLNESLIDLQELGKYEQYIKWPWYIWLGFIAGLIAIVMVTIMLCCMTSCCSCLKGCCSCGSCCKFDEDDSEPVLKGVKLHYT

SEQ ID NO: 66 - protein, 1263 aa, synthetic construct
  REGION 1..1263: note = RECOMBINANT SPIKE PROTEIN
MFVFLVLLPLVSSQCVNLTTRTQLPPAYTNSFTRGVYYPDKVFRSSVLHSTQDLFLPFFSNVTWFHAIHVSGTNGTKRFDNPVLPFNDGVYFASTEKSNIIRGWIFGTTLDSKTQSLLIVNNATNVVIKVCEFQFCNDPFLGVYYHKNNKSWMESEFRVYSSANNCTFEYVSQPFLMDLEGKQGNFKNLREFVFKNIDGYFKIYSKHTPINLVRDLPQGFSALEPLVDLPIGINITRFQTLLALHRSYLTPGDSSSGWTAGAAAYYVGYLQPRTFLLKYNENGTITDAVDCALDPLSETKCTLKSFTVEKGIYQTSNFRVQPTESIVRFPNITNLCPFGEVFNATRFASVYAWNRKRISNCVADYSVLYNSASFSTFKCYGVSPTKLNDLCFTNVYADSFVIRGDEVRQIAPGQTGKIADYNYKLPDDFTGCVIAWNSNNLDSKVGGNYNYLYRLFRKSNLKPFERDISTEIYQAGSTPCNGVEGFNCYFPLQSYGFQPTNGVGYQPYRVVVLSFELLHAPATVCGPKKSTNLVKNKCVNFNFNGLTGTGVLTESNKKFLPFQQFGRDIADTTDAVRDPQTLEILDITPCSFGGVSVITPGTNTSNQVAVLYQDVNCTEVPVAIHADQLTPTWRVYSTGSNVFQTRAGCLIGAEHVNNSYECDIPIGAGICASYQTQTNSPQQAQSVASQSIIAYTMSLGAENSVAYSNNSIAIPTNFTISVTTEILPVSMTKTSVDCTMYICGDSTECSNLLLQYGSFCTQLNRALTGIAVEQDKNTQEVFAQVKQIYKTPPIKDFGGFNFSQILPDPSKPSKRSFIADAGFIKQYGDCLGDIAARDLICAQKFNGLTVLPPLLTDEMIAQYTSALLAGTITSGWTFGAGAALQIPFAMQMAYRFNGIGVTQNVLYENQKLIANQFNSAIGKIQDSLSSTASALGKLQDVVNQNAQALNTLVKQLSSNFGAISSVLNDILSRLDKVEAEVQIDRLITGRLQSLQTYVTQQLIRAAEIRASANLAATKMSECVLGQSKRVDFCGKGYHLMSFPQSAPHGVVFLHVTYVPAQEKNFTTAPAICHDGKAHFPREGVFVSNGTHWFVTQRNFYEPQIITTDNTFVSGNCDVVIGIVNNTVYDPLQPELDSFKEELDKYFKNHTSPDVDLGDISGINASVVNIQKEIDRLNEVAKNLNESLIDLQELGKYEQYIKWPWYIWLGFIAGLIAIVMVTIMLCCMTSCCSCLKGCCSCGSCCKFDEDDSEPVLKGVKLHYT

SEQ ID NO: 67 - protein, 1250 aa, synthetic construct
  REGION 1..1250: note = RECOMBINANT SPIKE PROTEIN
QCVNLTTRTQLPPAYTNSFTRGVYYPDKVFRSSVLHSTQDLFLPFFSNVTWFHAIHVSGTNGTKRFDNPVLPFNDGVYFASTEKSNIIRGWIFGTTLDSKTQSLLIVNNATNVVIKVCEFQFCNDPFLGVYYHKNNKSWMESEFRVYSSANNCTFEYVSQPFLMDLEGKQGNFKNLREFVFKNIDGYFKIYSKHTPINLVRDLPQGFSALEPLVDLPIGINITRFQTLLALHRSYLTPGDSSSGWTAGAAAYYVGYLQPRTFLLKYNENGTITDAVDCALDPLSETKCTLKSFTVEKGIYQTSNFRVQPTESIVRFPNITNLCPFGEVFNATRFASVYAWNRKRISNCVADYSVLYNSASFSTFKCYGVSPTKLNDLCFTNVYADSFVIRGDEVRQIAPGQTGKIADYNYKLPDDFTGCVIAWNSNNLDSKVGGNYNYLYRLFRKSNLKPFERDISTEIYQAGSTPCNGVEGFNCYFPLQSYGFQPTNGVGYQPYRVVVLSFELLHAPATVCGPKKSTNLVKNKCVNFNFNGLTGTGVLTESNKKFLPFQQFGRDIADTTDAVRDPQTLEILDITPCSFGGVSVITPGTNTSNQVAVLYQDVNCTEVPVAIHADQLTPTWRVYSTGSNVFQTRAGCLIGAEHVNNSYECDIPIGAGICASYQTQTNSPQQAQSVASQSIIAYTMSLGAENSVAYSNNSIAIPTNFTISVTTEILPVSMTKTSVDCTMYICGDSTECSNLLLQYGSFCTQLNRALTGIAVEQDKNTQEVFAQVKQIYKTPPIKDFGGFNFSQILPDPSKPSKRSFIADAGFIKQYGDCLGDIAARDLICAQKFNGLTVLPPLLTDEMIAQYTSALLAGTITSGWTFGAGAALQIPFAMQMAYRFNGIGVTQNVLYENQKLIANQFNSAIGKIQDSLSSTASALGKLQDVVNQNAQALNTLVKQLSSNFGAISSVLNDILSRLDKVEAEVQIDRLITGRLQSLQTYVTQQLIRAAEIRASANLAATKMSECVLGQSKRVDFCGKGYHLMSFPQSAPHGVVFLHVTYVPAQEKNFTTAPAICHDGKAHFPREGVFVSNGTHWFVTQRNFYEPQIITTDNTFVSGNCDVVIGIVNNTVYDPLQPELDSFKEELDKYFKNHTSPDVDLGDISGINASVVNIQKEIDRLNEVAKNLNESLIDLQELGKYEQYIKWPWYIWLGFIAGLIAIVMVTIMLCCMTSCCSCLKGCCSCGSCCKFDEDDSEPVLKGVKLHYT

SEQ ID NO: 68 - protein, 31 aa, synthetic construct
  REGION 1..31: note = Foldon
SAIGGYIPEAPRDGQAYVRKDGEWVLLSTFL

SEQ ID NO: 69 - protein, 202 aa, Severe acute respiratory syndrome-related coronavirus
RFPNITNLCPFGEVFNATRFASVYAWNRKRISNCVADYSVLYNSASFSTFKCYGVSPTKLNDLCFTNVYADSFVIRGDEVRQIAPGQTGKIADYNYKLPDDFTGCVIAWNSNNLDSKVGGNYNYLYRLFRKSNLKPFERDISTEIYQAGSTPCNGVEGFNCYFPLQSYGFQPTNGVGYQPYRVVVLSFELLHAPATVCGPKK

SEQ ID NO: 70 - protein, 201 aa, Severe acute respiratory syndrome-related coronavirus
RFPNITNLCPFGEVFNATKFPSVYAWERKKISNCVADYSVLYNSTFFSTFKCYGVSATKLNDLCFSNVYADSFVVKGDDVRQIAPGQTGVIADYNYKLPDDFMGCVLAWNTRNIDATSTGNYNYKYRYLRHGKLRPFERDISNVPFSPDGKPCTPPALNCYWPLNDYGFYTTTGIGYQPYRVVVLSFELLNAPATVCGPKL

SEQ ID NO: 71 - protein, 239 aa, Severe acute respiratory syndrome-related coronavirus
FEAKPSGSVVAEGVECDFSPLLSGTPPQVYNFKRLVFTNCNYNLTKLLSLFSVNDFTCSQISPAAIASNCYSSLILDYFSYPLSMKSDLSVSSAGPISQFNYKQSFSNPTCLILATVPHNLTTITKPLKYSYINKCSRLLSDDRTEVPQLVNANQYSPCVSIVPSTVWEDGDYYRKQLSPLEGGGWLVASGSTVAMTEQLQMGFGITVQYGTDTNSVCPKLEFANDTKIASQLGNCVEY

SEQ ID NO: 72 - protein, 544 aa, synthetic construct
  REGION 1..544: note = RECOMBINANT SPIKE PROTEIN
MFVFLVLLPLVSSRFPNITNLCPFGEVFNATRFASVYAWNRKRISNCVADYSVLYNSASFSTFKCYGVSPTKLNDLCFTNVYADSFVIRGDEVRQIAPGQTGKIADYNYKLPDDFTGCVIAWNSNNLDSKVGGNYNYLYRLFRKSNLKPFERDISTEIYQAGSTPCNGVEGFNCYFPLQSYGFQPTNGVGYQPYRVVVLSFELLHAPATVCGPKKSTNLVKNKCVNFNFNGLTGTGVLTESNKKFLPFQQFGRDIADTTDAVRDPQTLEILDITPCSFGGVSVITPGTNTSNQVAVLYQDVNCTERFPNITNLCPFGEVFNATRFASVYAWNRKRISNCVADYSVLYNSASFSTFKCYGVSPTKLNDLCFTNVYADSFVIRGDEVRQIAPGQTGKIADYNYKLPDDFTGCVIAWNSNNLDSKVGGNYNYLYRLFRKSNLKPFERDISTEIYQAGSTPCNGVEGFNCYFPLQSYGFQPTNGVGYQPYRVVVLSFELLHAPATVCGPKKSAIGGYIPEAPRDGQAYVRKDGEWVLLSTFLHHHHHH

SEQ ID NO: 73 - protein, 531 aa, synthetic construct
  REGION 1..531: note = RECOMBINANT SPIKE PROTEIN
RFPNITNLCPFGEVFNATRFASVYAWNRKRISNCVADYSVLYNSASFSTFKCYGVSPTKLNDLCFTNVYADSFVIRGDEVRQIAPGQTGKIADYNYKLPDDFTGCVIAWNSNNLDSKVGGNYNYLYRLFRKSNLKPFERDISTEIYQAGSTPCNGVEGFNCYFPLQSYGFQPTNGVGYQPYRVVVLSFELLHAPATVCGPKKSTNLVKNKCVNFNFNGLTGTGVLTESNKKFLPFQQFGRDIADTTDAVRDPQTLEILDITPCSFGGVSVITPGTNTSNQVAVLYQDVNCTERFPNITNLCPFGEVFNATRFASVYAWNRKRISNCVADYSVLYNSASFSTFKCYGVSPTKLNDLCFTNVYADSFVIRGDEVRQIAPGQTGKIADYNYKLPDDFTGCVIAWNSNNLDSKVGGNYNYLYRLFRKSNLKPFERDISTEIYQAGSTPCNGVEGFNCYFPLQSYGFQPTNGVGYQPYRVVVLSFELLHAPATVCGPKKSAIGGYIPEAPRDGQAYVRKDGEWVLLSTFLHHHHHH

SEQ ID NO: 74 - protein, 544 aa, synthetic construct; identical to SEQ ID NO: 72
  REGION 1..544: note = RECOMBINANT SPIKE PROTEIN

SEQ ID NO: 75 - protein, 531 aa, synthetic construct; identical to SEQ ID NO: 73
  REGION 1..531: note = RECOMBINANT SPIKE PROTEIN

SEQ ID NO: 76 - protein, 470 aa, synthetic construct
  REGION 1..470: note = RECOMBINANT SPIKE PROTEIN
MFVFLVLLPLVSSRFPNITNLCPFGEVFNATRFASVYAWNRKRISNCVADYSVLYNSASFSTFKCYGVSPTKLNDLCFTNVYADSFVIRGDEVRQIAPGQTGKIADYNYKLPDDFTGCVIAWNSNNLDSKVGGNYNYLYRLFRKSNLKPFERDISTEIYQAGSTPCNGVEGFNCYFPLQSYGFQPTNGVGYQPYRVVVLSFELLHAPATVCGPKKSGGGSGGGSGGGSGGGSRFPNITNLCPFGEVFNATKFPSVYAWERKKISNCVADYSVLYNSTFFSTFKCYGVSATKLNDLCFSNVYADSFVVKGDDVRQIAPGQTGVIADYNYKLPDDFMGCVLAWNTRNIDATSTGNYNYKYRYLRHGKLRPFERDISNVPFSPDGKPCTPPALNCYWPLNDYGFYTTTGIGYQPYRVVVLSFELLNAPATVCGPKLSAIGGYIPEAPRDGQAYVRKDGEWVLLSTFLHHHHHH

SEQ ID NO: 77 - protein, 464 aa, synthetic construct
  REGION 1..464: note = RECOMBINANT SPIKE PROTEIN
MFVFLVLLPLVSSRFPNITNLCPFGEVFNATRFASVYAWNRKRISNCVADYSVLYNSASFSTFKCYGVSPTKLNDLCFTNVYADSFVIRGDEVRQIAPGQTGKIADYNYKLPDDFTGCVIAWNSNNLDSKVGGNYNYLYRLFRKSNLKPFERDISTEIYQAGSTPCNGVEGFNCYFPLQSYGFQPTNGVGYQPYRVVVLSFELLHAPATVCGPKKSGGGSGGGSGGGSGGGSRFPNITNLCPFGEVFNATKFPSVYAWERKKISNCVADYSVLYNSTFFSTFKCYGVSATKLNDLCFSNVYADSFVVKGDDVRQIAPGQTGVIADYNYKLPDDFMGCVLAWNTRNIDATSTGNYNYKYRYLRHGKLRPFERDISNVPFSPDGKPCTPPALNCYWPLNDYGFYTTTGIGYQPYRVVVLSFELLNAPATVCGPKLSAIGGYIPEAPRDGQAYVRKDGEWVLLSTFL

SEQ ID NO: 78 - protein, 457 aa, synthetic construct
  REGION 1..457: note = RECOMBINANT SPIKE PROTEIN
RFPNITNLCPFGEVFNATRFASVYAWNRKRISNCVADYSVLYNSASFSTFKCYGVSPTKLNDLCFTNVYADSFVIRGDEVRQIAPGQTGKIADYNYKLPDDFTGCVIAWNSNNLDSKVGGNYNYLYRLFRKSNLKPFERDISTEIYQAGSTPCNGVEGFNCYFPLQSYGFQPTNGVGYQPYRVVVLSFELLHAPATVCGPKKSGGGSGGGSGGGSGGGSRFPNITNLCPFGEVFNATKFPSVYAWERKKISNCVADYSVLYNSTFFSTFKCYGVSATKLNDLCFSNVYADSFVVKGDDVRQIAPGQTGVIADYNYKLPDDFMGCVLAWNTRNIDATSTGNYNYKYRYLRHGKLRPFERDISNVPFSPDGKPCTPPALNCYWPLNDYGFYTTTGIGYQPYRVVVLSFELLNAPATVCGPKLSAIGGYIPEAPRDGQAYVRKDGEWVLLSTFLHHHHHH

SEQ ID NO: 79 - protein, 451 aa, synthetic construct
  REGION 1..451: note = RECOMBINANT SPIKE PROTEIN
RFPNITNLCPFGEVFNATRFASVYAWNRKRISNCVADYSVLYNSASFSTFKCYGVSPTKLNDLCFTNVYADSFVIRGDEVRQIAPGQTGKIADYNYKLPDDFTGCVIAWNSNNLDSKVGGNYNYLYRLFRKSNLKPFERDISTEIYQAGSTPCNGVEGFNCYFPLQSYGFQPTNGVGYQPYRVVVLSFELLHAPATVCGPKKSGGGSGGGSGGGSGGGSRFPNITNLCPFGEVFNATKFPSVYAWERKKISNCVADYSVLYNSTFFSTFKCYGVSATKLNDLCFSNVYADSFVVKGDDVRQIAPGQTGVIADYNYKLPDDFMGCVLAWNTRNIDATSTGNYNYKYRYLRHGKLRPFERDISNVPFSPDGKPCTPPALNCYWPLNDYGFYTTTGIGYQPYRVVVLSFELLNAPATVCGPKLSAIGGYIPEAPRDGQAYVRKDGEWVLLSTFL

SEQ ID NO: 80 - protein, 726 aa, synthetic construct
  REGION 1..726: note = RECOMBINANT SPIKE PROTEIN
MFVFLVLLPLVSSRFPNITNLCPFGEVFNATRFASVYAWNRKRISNCVADYSVLYNSASFSTFKCYGVSPTKLNDLCFTNVYADSFVIRGDEVRQIAPGQTGKIADYNYKLPDDFTGCVIAWNSNNLDSKVGGNYNYLYRLFRKSNLKPFERDISTEIYQAGSTPCNGVEGFNCYFPLQSYGFQPTNGVGYQPYRVVVLSFELLHAPATVCGPKKSGGGSGGGSGGGSGGGSFEAKPSGSVVAEGVECDFSPLLSGTPPQVYNFKRLVFTNCNYNLTKLLSLFSVNDFTCSQISPAAIASNCYSSLILDYFSYPLSMKSDLSVSSAGPISQFNYKQSFSNPTCLILATVPHNLTTITKPLKYSYINKCSRLLSDDRTEVPQLVNANQYSPCVSIVPSTVWEDGDYYRKQLSPLEGGGWLVASGSTVAMTEQLQMGFGITVQYGTDTNSVCPKLEFANDTKIASQLGNCVEYSGGGSGGGSGGGSGGGSRFPNITNLCPFGEVFNATKFPSVYAWERKKISNCVADYSVLYNSTFFSTFKCYGVSATKLNDLCFSNVYADSFVVKGDDVRQIAPGQTGVIADYNYKLPDDFMGCVLAWNTRNIDATSTGNYNYKYRYLRHGKLRPFERDISNVPFSPDGKPCTPPALNCYWPLNDYGFYTTTGIGYQPYRVVVLSFELLNAPATVCGPKLSAIGGYIPEAPRDGQAYVRKDGEWVLLSTFLHHHHHH

SEQ ID NO: 81 - protein, 720 aa, synthetic construct
  REGION 1..720: note = RECOMBINANT SPIKE PROTEIN
MFVFLVLLPLVSSRFPNITNLCPFGEVFNATRFASVYAWNRKRISNCVADYSVLYNSASFSTFKCYGVSPTKLNDLCFTNVYADSFVIRGDEVRQIAPGQTGKIADYNYKLPDDFTGCVIAWNSNNLDSKVGGNYNYLYRLFRKSNLKPFERDISTEIYQAGSTPCNGVEGFNCYFPLQSYGFQPTNGVGYQPYRVVVLSFELLHAPATVCGPKKSGGGSGGGSGGGSGGGSFEAKPSGSVVAEGVECDFSPLLSGTPPQVYNFKRLVFTNCNYNLTKLLSLFSVNDFTCSQISPAAIASNCYSSLILDYFSYPLSMKSDLSVSSAGPISQFNYKQSFSNPTCLILATVPHNLTTITKPLKYSYINKCSRLLSDDRTEVPQLVNANQYSPCVSIVPSTVWEDGDYYRKQLSPLEGGGWLVASGSTVAMTEQLQMGFGITVQYGTDTNSVCPKLEFANDTKIASQLGNCVEYSGGGSGGGSGGGSGGGSRFPNITNLCPFGEVFNATKFPSVYAWERKKISNCVADYSVLYNSTFFSTFKCYGVSATKLNDLCFSNVYADSFVVKGDDVRQIAPGQTGVIADYNYKLPDDFMGCVLAWNTRNIDATSTGNYNYKYRYLRHGKLRPFERDISNVPFSPDGKPCTPPALNCYWPLNDYGFYTTTGIGYQPYRVVVLSFELLNAPATVCGPKLSAIGGYIPEAPRDGQAYVRKDGEWVLLSTFL

SEQ ID NO: 82 - protein, 713 aa, synthetic construct
  REGION 1..713: note = RECOMBINANT SPIKE PROTEIN
RFPNITNLCPFGEVFNATRFASVYAWNRKRISNCVADYSVLYNSASFSTFKCYGVSPTKLNDLCFTNVYADSFVIRGDEVRQIAPGQTGKIADYNYKLPDDFTGCVIAWNSNNLDSKVGGNYNYLYRLFRKSNLKPFERDISTEIYQAGSTPCNGVEGFNCYFPLQSYGFQPTNGVGYQPYRVVVLSFELLHAPATVCGPKKSGGGSGGGSGGGSGGGSFEAKPSGSVVAEGVECDFSPLLSGTPPQVYNFKRLVFTNCNYNLTKLLSLFSVNDFTCSQISPAAIASNCYSSLILDYFSYPLSMKSDLSVSSAGPISQFNYKQSFSNPTCLILATVPHNLTTITKPLKYSYINKCSRLLSDDRTEVPQLVNANQYSPCVSIVPSTVWEDGDYYRKQLSPLEGGGWLVASGSTVAMTEQLQMGFGITVQYGTDTNSVCPKLEFANDTKIASQLGNCVEYSGGGSGGGSGGGSGGGSRFPNITNLCPFGEVFNATKFPSVYAWERKKISNCVADYSVLYNSTFFSTFKCYGVSATKLNDLCFSNVYADSFVVKGDDVRQIAPGQTGVIADYNYKLPDDFMGCVLAWNTRNIDATSTGNYNYKYRYLRHGKLRPFERDISNVPFSPDGKPCTPPALNCYWPLNDYGFYTTTGIGYQPYRVVVLSFELLNAPATVCGPKLSAIGGYIPEAPRDGQAYVRKDGEWVLLSTFLHHHHHH

SEQ ID NO: 83 - protein, 707 aa, synthetic construct
  REGION 1..707: note = RECOMBINANT SPIKE PROTEIN
RFPNITNLCPFGEVFNATRFASVYAWNRKRISNCVADYSVLYNSASFSTFKCYGVSPTKLNDLCFTNVYADSFVIRGDEVRQIAPGQTGKIADYNYKLPDDFTGCVIAWNSNNLDSKVGGNYNYLYRLFRKSNLKPFERDISTEIYQAGSTPCNGVEGFNCYFPLQSYGFQPTNGVGYQPYRVVVLSFELLHAPATVCGPKKSGGGSGGGSGGGSGGGSFEAKPSGSVVAEGVECDFSPLLSGTPPQVYNFKRLVFTNCNYNLTKLLSLFSVNDFTCSQISPAAIASNCYSSLILDYFSYPLSMKSDLSVSSAGPISQFNYKQSFSNPTCLILATVPHNLTTITKPLKYSYINKCSRLLSDDRTEVPQLVNANQYSPCVSIVPSTVWEDGDYYRKQLSPLEGGGWLVASGSTVAMTEQLQMGFGITVQYGTDTNSVCPKLEFANDTKIASQLGNCVEYSGGGSGGGSGGGSGGGSRFPNITNLCPFGEVFNATKFPSVYAWERKKISNCVADYSVLYNSTFFSTFKCYGVSATKLNDLCFSNVYADSFVVKGDDVRQIAPGQTGVIADYNYKLPDDFMGCVLAWNTRNIDATSTGNYNYKYRYLRHGKLRPFERDISNVPFSPDGKPCTPPALNCYWPLNDYGFYTTTGIGYQPYRVVVLSFELLNAPATVCGPKLSAIGGYIPEAPRDGQAYVRKDGEWVLLSTFL

SEQ ID NO: 84 - protein, 1273 aa, synthetic construct
  REGION 1..1273: note = RECOMBINANT SPIKE PROTEIN
MFVFLVLLPLVSSQCVNLTTRTQLPPAYTNSFTRGVYYPDKVFRSSVLHSTQDLFLPFFSNVTWFHAIHVSGTNGTKRFDNPVLPFNDGVYFASTEKSNIIRGWIFGTTLDSKTQSLLIVNNATNVVIKVCEFQFCNDPFLGVYYHKNNKSWMESEFRVYSSANNCTFEYVSQPFLMDLEGKQGNFKNLREFVFKNIDGYFKIYSKHTPINLVRDLPQGFSALEPLVDLPIGINITRFQTLLALHRSYLTPGDSSSGWTAGAAAYYVGYLQPRTFLLKYNENGTITDAVDCALDPLSETKCTLKSFTVEKGIYQTSNFRVQPTESIVRFPNITNLCPFGEVFNATRFASVYAWNRKRISNCVADYSVLYNSASFSTFKCYGVSPTKLNDLCFTNVYADSFVIRGDEVRQIAPGQTGKIADYNYKLPDDFTGCVIAWNSNNLDSKVGGNYNYLYRLFRKSNLKPFERDISTEIYQAGSTPCNGVEGFNCYFPLQSYGFQPTNGVGYQPYRVVVLSFELLHAPATVCGPKKSTNLVKNKCVNFNFNGLTGTGVLTESNKKFLPFQQFGRDIADTTDAVRDPQTLEILDITPCSFGGVSVITPGTNTSNQVAVLYQDVNCTEVPVAIHADQLTPTWRVYSTGSNVFQTRAGCLIGAEHVNNSYECDIPIGAGICASYQTQTNSPRRARSVASQSIIAYTMSLGAENSVAYSNNSIAIPTNFTISVTTEILPVSMTKTSVDCTMYICGDSTECSNLLLQYGSFCTQLNRALTGIAVEQDKNTQEVFAQVKQIYKTPPIKDFGGFNFSQILPDPSKPSKRSFIEDLLFNKVTLADAGFIKQYGDCLGDIAARDLICAQKFNGLTVLPPLLTDEMIAQYTSALLAGTITSGWTFGAGAALQIPFAMQMAYRFNGIGVTQNVLYENQKLIANQFNSAIGKIQDSLSSTASALGKLQDVVNQNAQALNTLVKQLSSNFGAISSVLNDILSRLDPPEAEVQIDRLITGRLQSLQTYVTQQLIRAAEIRASANLAATKMSECVLGQSKRVDFCGKGYHLMSFPQSAPHGVVFLHVTYVPAQEKNFTTAPAICHDGKAHFPREGVFVSNGTHWFVTQRNFYEPQIITTDNTFVSGNCDVVIGIVNNTVYDPLQPELDSFKEELDKYFKNHTSPDVDLGDISGINASVVNIQKEIDRLNEVAKNLNESLIDLQELGKYEQYIKWPWYIWLGFIAGLIAIVMVTIMLCCMTSCCSCLKGCCSCGSCCKFDEDDSEPVLKGVKLHYT

SEQ ID NO: 85 - protein, 1260 aa, synthetic construct
  REGION 1..1260: note = RECOMBINANT SPIKE PROTEIN
QCVNLTTRTQLPPAYTNSFTRGVYYPDKVFRSSVLHSTQDLFLPFFSNVTWFHAIHVSGTNGTKRFDNPVLPFNDGVYFASTEKSNIIRGWIFGTTLDSKTQSLLIVNNATNVVIKVCEFQFCNDPFLGVYYHKNNKSWMESEFRVYSSANNCTFEYVSQPFLMDLEGKQGNFKNLREFVFKNIDGYFKIYSKHTPINLVRDLPQGFSALEPLVDLPIGINITRFQTLLALHRSYLTPGDSSSGWTAGAAAYYVGYLQPRTFLLKYNENGTITDAVDCALDPLSETKCTLKSFTVEKGIYQTSNFRVQPTESIVRFPNITNLCPFGEVFNATRFASVYAWNRKRISNCVADYSVLYNSASFSTFKCYGVSPTKLNDLCFTNVYADSFVIRGDEVRQIAPGQTGKIADYNYKLPDDFTGCVIAWNSNNLDSKVGGNYNYLYRLFRKSNLKPFERDISTEIYQAGSTPCNGVEGFNCYFPLQSYGFQPTNGVGYQPYRVVVLSFELLHAPATVCGPKKSTNLVKNKCVNFNFNGLTGTGVLTESNKKFLPFQQFGRDIADTTDAVRDPQTLEILDITPCSFGGVSVITPGTNTSNQVAVLYQDVNCTEVPVAIHADQLTPTWRVYSTGSNVFQTRAGCLIGAEHVNNSYECDIPIGAGICASYQTQTNSPRRARSVASQSIIAYTMSLGAENSVAYSNNSIAIPTNFTISVTTEILPVSMTKTSVDCTMYICGDSTECSNLLLQYGSFCTQLNRALTGIAVEQDKNTQEVFAQVKQIYKTPPIKDFGGFNFSQILPDPSKPSKRSFIEDLLFNKVTLADAGFIKQYGDCLGDIAARDLICAQKFNGLTVLPPLLTDEMIAQYTSALLAGTITSGWTFGAGAALQIPFAMQMAYRFNGIGVTQNVLYENQKLIANQFNSAIGKIQDSLSSTASALGKLQDVVNQNAQALNTLVKQLSSNFGAISSVLNDILSRLDPPEAEVQIDRLITGRLQSLQTYVTQQLIRAAEIRASANLAATKMSECVLGQSKRVDFCGKGYHLMSFPQSAPHGVVFLHVTYVPAQEKNFTTAPAICHDGKAHFPREGVFVSNGTHWFVTQRNFYEPQIITTDNTFVSGNCDVVIGIVNNTVYDPLQPELDSFKEELDKYFKNHTSPDVDLGDISGINASVVNIQKEIDRLNEVAKNLNESLIDLQELGKYEQYIKWPWYIWLGFIAGLIAIVMVTIMLCCMTSCCSCLKGCCSCGSCCKFDEDDSEPVLKGVKLHYT

SEQ ID NO: 86 - protein, 1273 aa, synthetic construct
  REGION 1..1273: note = RECOMBINANT SPIKE PROTEIN
MFVFLVLLPLVSSQCVNLTTRTQLPPAYTNSFTRGVYYPDKVFRSSVLHSTQDLFLPFFSNVTWFHAIHVSGTNGTKRFDNPVLPFNDGVYFASTEKSNIIRGWIFGTTLDSKTQSLLIVNNATNVVIKVCEFQFCNDPFLGVYYHKNNKSWMESEFRVYSSANNCTFEYVSQPFLMDLEGKQGNFKNLREFVFKNIDGYFKIYSKHTPINLVRDLPQGFSALEPLVDLPIGINITRFQTLLALHRSYLTPGDSSSGWTAGAAAYYVGYLQPRTFLLKYNENGTITDAVDCALDPLSETKCTLKSFTVEKGIYQTSNFRVQPTESIVRFPNITNLCPFGEVFNATRFASVYAWNRKRISNCVADYSVLYNSASFSTFKCYGVSPTKLNDLCFTNVYADSFVIRGDEVRQIAPGQTGKIADYNYKLPDDFTGCVIAWNSNNLDSKVGGNYNYLYRLFRKSNLKPFERDISTEIYQAGSTPCNGVEGFNCYFPLQSYGFQPTNGVGYQPYRVVVLSFELLHAPATVCGPKKSTNLVKNKCVNFNFNGLTGTGVLTESNKKFLPFQQFGRDIADTTDAVRDPQTLEILDITPCSFGGVSVITPGTNTSNQVAVLYQDVNCTEVPVAIHADQLTPTWRVYSTGSNVFQTRAGCLIGAEHVNNSYECDIPIGAGICASYQTQTNSPQQAQSVASQSIIAYTMSLGAENSVAYSNNSIAIPTNFTISVTTEILPVSMTKTSVDCTMYICGDSTECSNLLLQYGSFCTQLNRALTGIAVEQDKNTQEVFAQVKQIYKTPPIKDFGGFNFSQILPDPSKPSKRSFIEDLLFNKVTLADAGFIKQYGDCLGDIAARDLICAQKFNGLTVLPPLLTDEMIAQYTSALLAGTITSGWTFGAGAALQIPFAMQMAYRFNGIGVTQNVLYENQKLIANQFNSAIGKIQDSLSSTASALGKLQDVVNQNAQALNTLVKQLSSNFGAISSVLNDILSRLDPPEAEVQIDRLITGRLQSLQTYVTQQLIRAAEIRASANLAATKMSECVLGQSKRVDFCGKGYHLMSFPQSAPHGVVFLHVTYVPAQEKNFTTAPAICHDGKAHFPREGVFVSNGTHWFVTQRNFYEPQIITTDNTFVSGNCDVVIGIVNNTVYDPLQPELDSFKEELDKYFKNHTSPDVDLGDISGINASVVNIQKEIDRLNEVAKNLNESLIDLQELGKYEQYIKWPWYIWLGFIAGLIAIVMVTIMLCCMTSCCSCLKGCCSCGSCCKFDEDDSEPVLKGVKLHYT

SEQ ID NO: 87 - protein, 1260 aa, synthetic construct
  REGION 1..1260: note = RECOMBINANT SPIKE PROTEIN
QCVNLTTRTQLPPAYTNSFTRGVYYPDKVFRSSVLHSTQDLFLPFFSNVTWFHAIHVSGTNGTKRFDNPVLPFNDGVYFASTEKSNIIRGWIFGTTLDSKTQSLLIVNNATNVVIKVCEFQFCNDPFLGVYYHKNNKSWMESEFRVYSSANNCTFEYVSQPFLMDLEGKQGNFKNLREFVFKNIDGYFKIYSKHTPINLVRDLPQGFSALEPLVDLPIGINITRFQTLLALHRSYLTPGDSSSGWTAGAAAYYVGYLQPRTFLLKYNENGTITDAVDCALDPLSETKCTLKSFTVEKGIYQTSNFRVQPTESIVRFPNITNLCPFGEVFNATRFASVYAWNRKRISNCVADYSVLYNSASFSTFKCYGVSPTKLNDLCFTNVYADSFVIRGDEVRQIAPGQTGKIADYNYKLPDDFTGCVIAWNSNNLDSKVGGNYNYLYRLFRKSNLKPFERDISTEIYQAGSTPCNGVEGFNCYFPLQSYGFQPTNGVGYQPYRVVVLSFELLHAPATVCGPKKSTNLVKNKCVNFNFNGLTGTGVLTESNKKFLPFQQFGRDIADTTDAVRDPQTLEILDITPCSFGGVSVITPGTNTSNQVAVLYQDVNCTEVPVAIHADQLTPTWRVYSTGSNVFQTRAGCLIGAEHVNNSYECDIPIGAGICASYQTQTNSPQQAQSVASQSIIAYTMSLGAENSVAYSNNSIAIPTNFTISVTTEILPVSMTKTSVDCTMYICGDSTECSNLLLQYGSFCTQLNRALTGIAVEQDKNTQEVFAQVKQIYKTPPIKDFGGFNFSQILPDPSKPSKRSFIEDLLFNKVTLADAGFIKQYGDCLGDIAARDLICAQKFNGLTVLPPLLTDEMIAQYTSALLAGTITSGWTFGAGAALQIPFAMQMAYRFNGIGVTQNVLYENQKLIANQFNSAIGKIQDSLSSTASALGKLQDVVNQNAQALNTLVKQLSSNFGAISSVLNDILSRLDPPEAEVQIDRLITGRLQSLQTYVTQQLIRAAEIRASANLAATKMSECVLGQSKRVDFCGKGYHLMSFPQSAPHGVVFLHVTYVPAQEKNFTTAPAICHDGKAHFPREGVFVSNGTHWFVTQRNFYEPQIITTDNTFVSGNCDVVIGIVNNTVYDPLQPELDSFKEELDKYFKNHTSPDVDLGDISGINASVVNIQKEIDRLNEVAKNLNESLIDLQELGKYEQYIKWPWYIWLGFIAGLIAIVMVTIMLCCMTSCCSCLKGCCSCGSCCKFDEDDSEPVLKGVKLHYT

SEQ ID NO: 88 - protein, 1219 aa, synthetic construct
  REGION 1..1219: note = RECOMBINANT SPIKE PROTEIN
MFVFLVLLPLVSSQCVNLTTRTQLPPAYTNSFTRGVYYPDKVFRSSVLHSTQDLFLPFFSNVTWFHAIHVSGTNGTKRFDNPVLPFNDGVYFASTEKSNIIRGWIFGTTLDSKTQSLLIVNNATNVVIKVCEFQFCNDPFLGVYYHKNNKSWMESEFRVYSSANNCTFEYVSQPFLMDLEGKQGNFKNLREFVFKNIDGYFKIYSKHTPINLVRDLPQGFSALEPLVDLPIGINITRFQTLLALHRSYLTPGDSSSGWTAGAAAYYVGYLQPRTFLLKYNENGTITDAVDCALDPLSETKCTLKSFTVEKGIYQTSNFRVQPTESIVRFPNITNLCPFGEVFNATRFASVYAWNRKRISNCVADYSVLYNSASFSTFKCYGVSPTKLNDLCFTNVYADSFVIRGDEVRQIAPGQTGKIADYNYKLPDDFTGCVIAWNSNNLDSKVGGNYNYLYRLFRKSNLKPFERDISTEIYQAGSTPCNGVEGFNCYFPLQSYGFQPTNGVGYQPYRVVVLSFELLHAPATVCGPKKSTNLVKNKCVNFNFNGLTGTGVLTESNKKFLPFQQFGRDIADTTDAVRDPQTLEILDITPCSFGGVSVITPGTNTSNQVAVLYQDVNCTEVPVAIHADQLTPTWRVYSTGSNVFQTRAGCLIGAEHVNNSYECDIPIGAGICASYQTQTNSPQQAQSVASQSIIAYTMSLGAENSVAYSNNSIAIPTNFTISVTTEILPVSMTKTSVDCTMYICGDSTECSNLLLQYGSFCTQLNRALTGIAVEQDKNTQEVFAQVKQIYKTPPIKDFGGFNFSQILPDPSKPSKRSFIEDLLFNKVTLADAGFIKQYGDCLGDIAARDLICAQKFNGLTVLPPLLTDEMIAQYTSALLAGTITSGWTFGAGAALQIPFAMQMAYRFNGIGVTQNVLYENQKLIANQFNSAIGKIQDSLSSTASALGKLQDVVNQNAQALNTLVKQLSSNFGAISSVLNDILSRLDPPEAEVQIDRLITGRLQSLQTYVTQQLIRAAEIRASANLAATKMSECVLGQSKRVDFCGKGYHLMSFPQSAPHGVVFLHVTYVPAQEKNFTTAPAICHDGKAHFPREGVFVSNGTHWFVTQRNFYEPQIITTDNTFVSGNCDVVIGIVNNTVYDPLQPELDSFKEELDKYFKNHTSPDVDLGDISGINASVVNIQKEIDRLNEVAKNLNESLIDLQELGKYEQYIKWPHHHHHH

SEQ ID NO: 89 - protein, 1206 aa, synthetic construct
  REGION 1..1206: note = RECOMBINANT SPIKE PROTEIN
QCVNLTTRTQLPPAYTNSFTRGVYYPDKVFRSSVLHSTQDLFLPFFSNVTWFHAIHVSGTNGTKRFDNPVLPFNDGVYFASTEKSNIIRGWIFGTTLDSKTQSLLIVNNATNVVIKVCEFQFCNDPFLGVYYHKNNKSWMESEFRVYSSANNCTFEYVSQPFLMDLEGKQGNFKNLREFVFKNIDGYFKIYSKHTPINLVRDLPQGFSALEPLVDLPIGINITRFQTLLALHRSYLTPGDSSSGWTAGAAAYYVGYLQPRTFLLKYNENGTITDAVDCALDPLSETKCTLKSFTVEKGIYQTSNFRVQPTESIVRFPNITNLCPFGEVFNATRFASVYAWNRKRISNCVADYSVLYNSASFSTFKCYGVSPTKLNDLCFTNVYADSFVIRGDEVRQIAPGQTGKIADYNYKLPDDFTGCVIAWNSNNLDSKVGGNYNYLYRLFRKSNLKPFERDISTEIYQAGSTPCNGVEGFNCYFPLQSYGFQPTNGVGYQPYRVVVLSFELLHAPATVCGPKKSTNLVKNKCVNFNFNGLTGTGVLTESNKKFLPFQQFGRDIADTTDAVRDPQTLEILDITPCSFGGVSVITPGTNTSNQVAVLYQDVNCTEVPVAIHADQLTPTWRVYSTGSNVFQTRAGCLIGAEHVNNSYECDIPIGAGICASYQTQTNSPQQAQSVASQSIIAYTMSLGAENSVAYSNNSIAIPTNFTISVTTEILPVSMTKTSVDCTMYICGDSTECSNLLLQYGSFCTQLNRALTGIAVEQDKNTQEVFAQVKQIYKTPPIKDFGGFNFSQILPDPSKPSKRSFIEDLLFNKVTLADAGFIKQYGDCLGDIAARDLICAQKFNGLTVLPPLLTDEMIAQYTSALLAGTITSGWTFGAGAALQIPFAMQMAYRFNGIGVTQNVLYENQKLIANQFNSAIGKIQDSLSSTASALGKLQDVVNQNAQALNTLVKQLSSNFGAISSVLNDILSRLDPPEAEVQIDRLITGRLQSLQTYVTQQLIRAAEIRASANLAATKMSECVLGQSKRVDFCGKGYHLMSFPQSAPHGVVFLHVTYVPAQEKNFTTAPAICHDGKAHFPREGVFVSNGTHWFVTQRNFYEPQIITTDNTFVSGNCDVVIGIVNNTVYDPLQPELDSFKEELDKYFKNHTSPDVDLGDISGINASVVNIQKEIDRLNEVAKNLNESLIDLQELGKYEQYIKWPHHHHHH

SEQ ID NO: 90 - protein, 17 aa, synthetic construct
  REGION 1..17: note = Linker
SGGGSGGGSGGGSGGGS

SEQ ID NO: 91 - protein, 4 aa, synthetic construct
  REGION 1..4: note = Linker
SGGG

SEQ ID NO: 92 - protein, 4 aa, synthetic construct
  REGION 1..4: note = Linker
GGGS

SEQ ID NO: 93 - protein, 5 aa, synthetic construct
  REGION 1..5: note = Linker
GGGGS

SEQ ID NO: 94 - protein, 90 aa, synthetic construct
  REGION 1..90: note = RECOMBINANT SPIKE PROTEIN
STNLVKNKCVNFNFNGLTGTGVLTESNKKFLPFQQFGRDIADTTDAVRDPQTLEILDITPCSFGGVSVITPGTNTSNQVAVLYQDVNCTE

SEQ ID NO: 95 - DNA, 3639 bp, synthetic construct
  misc_feature 1..3639: note = RECOMBINANT SPIKE PROTEIN
  source 1..3639: mol_type = other DNA
atgttcgtcttcctggtgctgctgcccctggtgtccagccagtgcgtgaacctgaccactaggactcagctgcctcccgcttacaccaactcattcactcgcggtgtgtactaccctgacaaggtcttccgttcttcagtgctgcactcaactcaggacctgttcctgcccttcttctccaacgtcacctggttccacgccatccacgtgtccggcaccaacggcactaagcgcttcgacaacccagtgctgcctttcaacgacggtgtctacttcgcttcaaccgagaagtccaacatcatccgtggatggatcttcggcaccactctggacagcaagactcagtctctgctgatcgtcaacaacgccaccaacgtggtcatcaaggtctgcgaattccagttctgcaacgacccattcctgggcgtctactaccacaagaacaacaagtcatggatggagtccgaattccgcgtctactccagcgctaacaactgcactttcgagtacgtgtcccagcctttcctgatggacctggaaggaaagcagggtaacttcaagaacctgagggagttcgtgttcaagaacatcgacggatacttcaagatttacagcaagcacaccccaatcaacctggtgcgcgacctgcctcagggtttctctgctctggagccactggtggacctgcctatcggcatcaacatcacccgcttccagactctgctggctctgcaccgttcctacctgactccaggcgactcatcttctggatggactgctggagctgctgcttactacgtgggctacctgcagcctcgcaccttcctgctgaagtacaacgaaaacggaaccatcactgacgccgtcgactgcgctctggaccctctgtcagaaaccaagtgcactctgaagtccttcaccgtggagaagggcatctaccagacttcaaacttcagggtgcagcccaccgaatccatcgtcagattccctaacatcactaacctgtgccccttcggagaggtcttcaacgccacccgcttcgcttccgtgtacgcctggaacaggaagagaatctcaaactgcgtcgctgactactccgtgctgtacaactcagcctccttcagcaccttcaagtgctacggcgtgtcaccaactaagctgaacgacctgtgcttcaccaacgtctacgccgactccttcgtgatcaggggagacgaggtcagacagatcgctcctggccagactggaaagatcgccgactacaactacaagctgcccgacgacttcaccggttgcgtcatcgcttggaacagcaacaacctggactctaaagtgggtggcaactacaactacctgtaccgcctgttccgtaagtcaaacctgaagccattcgagagggacatcagcactgaaatctaccaggccggatctaccccttgcaacggtgtcgagggcttcaactgctacttccccctgcagtcctacggtttccagccaactaacggtgtgggctaccagccttacagagtggtcgtgctgagcttcgaactgctccacgctcctgctactgtgtgcggtccaaagaagtctaccaacctggtcaagaacaagtgcgtgaacttcaacttcaacggcctgaccggaactggtgtcctgaccgagagcaacaagaagttcctgcccttccagcagttcggaagggacatcgctgacaccactgacgctgtgcgcgaccctcagaccctggaaatcctggacatcactccatgctcattcggaggtgtctccgtgatcacccctggcaccaacacttctaaccaggtcgctgtgctgtaccaggacgtcaactgcaccgaggtccctgtggccatccacgctgaccagctgacccccacttggcgcgtgtactccaccggcagcaacgtgttccagactcgtgctggttgcctgatcggcgccgagcacgtgaacaacagctacgaatgcgacatccccatcggcgctggaatctgcgcctcttaccagacccagactaacagcccacgcagggctcgctctgtggcctctcagtcaatcatcgcttacaccatgtcactgggcgctgaaaactccgtggcctactctaacaactcaatcgccatccccaccaacttcactatcagcgtgaccactgagatcctgccagtcagcatgaccaagacttctgtggactgcactatgtacatctgcggagacagcaccgaatgctctaacctgctgctgcagtacggctctttctgcacccagctgaaccgtgctctgactggaatcgccgtggagcaggacaagaacactcaggaagtcttcgctcaggtgaagcaaatctacaagaccccacctatcaaggacttcggcggattcaacttctcccagatcctgcctgacccctccaagccaagcaagcgctctttcatcgaggacctgctgttcaacaaggtcactctggccgacgctggattcatcaagcagtacggagactgcctgggtgacatcgccgctcgtgacctgatctgcgctcagaagttcaacggtctgaccgtgctgcccccactgctgactgacgaaatgatcgcccagtacactagcgccctgctggctggaaccatcacttctggttggaccttcggtgctggcgccgctctgcagatccctttcgctatgcagatggcctaccgtttcaacggaatcggtgtcacccagaacgtgctgtacgagaaccagaagctgatcgctaaccagttcaactcagccatcggaaagatccaggacagcctgagctctactgcctctgctctgggcaagctgcaggacgtcgtgaaccagaacgcccaggctctgaacaccctggtcaagcagctgtcatccaacttcggtgctatcagctctgtgctgaacgacatcctgtcccgcctggacaaggtcgaggccgaagtgcagatcgaccgcctgatcactggccgtctgcagtcactgcagacctacgtgactcagcagctgatcagggccgctgaaatcagagcctccgctaacctggccgctaccaagatgagcgagtgcgtcctgggtcaatctaagcgtgtggacttctgcggcaagggataccacctgatgtcattccctcagtctgctccccacggtgtggtgttcctgcacgtcacctacgtgccagcccaggagaagaacttcaccactgcccctgctatctgccacgacggcaaggctcacttccccagggaaggtgtcttcgtgagcaacggcacccactggttcgtcactcagagaaacttctacgagccacagatcatcaccactgacaacactttcgtgtctggaaactgcgacgtggtcatcggtatcgtcaacaacaccgtgtacgaccccctgcagccagagctggactcattcaaggaggaactggacaagtacttcaagaaccacacctcccctgacgtcgacctgggcgacatctcaggaatcaacgcttccgtcgtgaacatccagaaggagatcgaccgcctgaacgaagtggccaagaacctgaacgaaagcctgatcgacctgcaggagctgggcaagtacgaacagtacatcaagtggcct

SEQ ID NO: 96 - DNA, 3822 bp, synthetic construct
  misc_feature 1..3822: note = RECOMBINANT SPIKE PROTEIN
  source 1..3822: mol_type = other DNA
atgttcgtcttcctggtgctgctgcccctggtgtccagccagtgcgtgaacctgaccactaggactcagctgcctcccgcttacaccaactcattcactcgcggtgtgtactaccctgacaaggtcttccgttcttcagtgctgcactcaactcaggacctgttcctgcccttcttctccaacgtcacctggttccacgccatccacgtgtccggcaccaacggcactaagcgcttcgacaacccagtgctgcctttcaacgacggtgtctacttcgcttcaaccgagaagtccaacatcatccgtggatggatcttcggcaccactctggacagcaagactcagtctctgctgatcgtcaacaacgccaccaacgtggtcatcaaggtctgcgaattccagttctgcaacgacccattcctgggcgtctactaccacaagaacaacaagtcatggatggagtccgaattccgcgtctactccagcgctaacaactgcactttcgagtacgtgtcccagcctttcctgatggacctggaaggaaagcagggtaacttcaagaacctgagggagttcgtgttcaagaacatcgacggatacttcaagatttacagcaagcacaccccaatcaacctggtgcgcgacctgcctcagggtttctctgctctggagccactggtggacctgcctatcggcatcaacatcacccgcttccagactctgctggctctgcaccgttcctacctgactccaggcgactcatcttctggatggactgctggagctgctgcttactacgtgggctacctgcagcctcgcaccttcctgctgaagtacaacgaaaacggaaccatcactgacgccgtcgactgcgctctggaccctctgtcagaaaccaagtgcactctgaagtccttcaccgtggagaagggcatctaccagacttcaaacttcagggtgcagcccaccgaatccatcgtcagattccctaacatcactaacctgtgccccttcggagaggtcttcaacgccacccgcttcgcttccgtgtacgcctggaacaggaagagaatctcaaactgcgtcgctgactactccgtgctgtacaactcagcctccttcagcaccttcaagtgctacggcgtgtcaccaactaagctgaacgacctgtgcttcaccaacgtctacgccgactccttcgtgatcaggggagacgaggtcagacagatcgctcctggccagactggaaagatcgccgactacaactacaagctgcccgacgacttcaccggttgcgtcatcgcttggaacagcaacaacctggactctaaagtgggtggcaactacaactacctgtaccgcctgttccgtaagtcaaacctgaagccattcgagagggacatcagcactgaaatctaccaggccggatctaccccttgcaacggtgtcgagggcttcaactgctacttccccctgcagtcctacggtttccagccaactaacggtgtgggctaccagccttacagagtggtcgtgctgagcttcgaactgctccacgctcctgctactgtgtgcggtccaaagaagtctaccaacctggtcaagaacaagtgcgtgaacttcaacttcaacggcctgaccggaactggtgtcctgaccgagagcaacaagaagttcctgcccttccagcagttcggaagggacatcgctgacaccactgacgctgtgcgcgaccctcagaccctggaaatcctggacatcactccatgctcattcggaggtgtctccgtgatcacccctggcaccaacacttctaaccaggtcgctgtgctgtaccaggacgtcaactgcaccgaggtccctgtggccatccacgctgaccagctgacccccacttggcgcgtgtactccaccggcagcaacgtgttccagactcgtgctggttgcctgatcggcgccgagcacgtgaacaacagctacgaatgcgacatccccatcggcgctggaatctgcgcctcttaccagacccagactaacagcccacagcaggctcagtctgtggcctctcagtcaatcatcgcttacaccatgtcactgggcgctgaaaactccgtggcctactctaacaactcaatcgccatccccaccaacttcactatcagcgtgaccactgagatcctgccagtcagcatgaccaagacttctgtggactgcactatgtacatctgcggagacagcaccgaatgctctaacctgctgctgcagtacggctctttctgcacccagctgaaccgtgctctgactggaatcgccgtggagcaggacaagaacactcaggaagtcttcgctcaggtgaagcaaatctacaagaccccacctatcaaggacttcggcggattcaacttctcccagatcctgcctgacccctccaagccaagcaagcgctctttcatcgaggacctgctgttcaacaaggtcactctggccgacgctggattcatcaagcagtacggagactgcctgggtgacatcgccgctcgtgacctgatctgcgctcagaagttcaacggtctgaccgtgctgcccccactgctgactgacgaaatgatcgcccagtacactagcgccctgctggctggaaccatcacttctggttggaccttcggtgctggcgccgctctgcagatccctttcgctatgcagatggcctaccgtttcaacggaatcggtgtcacccagaacgtgctgtacgagaaccagaagctgatcgctaaccagttcaactcagccatcggaaagatccaggacagcctgagctctactgcctctgctctgggcaagctgcaggacgtcgtgaaccagaacgcccaggctctgaacaccctggtcaagcagctgtcatccaacttcggtgctatcagctctgtgctgaacgacatcctgtcccgcctggaccctcccgaggccgaagtgcagatcgaccgcctgatcactggccgtctgcagtcactgcagacctacgtgactcagcagctgatcagggccgctgaaatcagagcctccgctaacctggccgctaccaagatgagcgagtgcgtcctgggtcaatctaagcgtgtggacttctgcggcaagggataccacctgatgtcattccctcagtctgctccccacggtgtggtgttcctgcacgtcacctacgtgccagcccaggagaagaacttcaccactgcccctgctatctgccacgacggcaaggctcacttccccagggaaggtgtcttcgtgagcaacggcacccactggttcgtcactcagagaaacttctacgagccacagatcatcaccactgacaacactttcgtgtctggaaactgcgacgtggtcatcggtatcgtcaacaacaccgtgtacgaccccctgcagccagagctggactcattcaaggaggaactggacaagtacttcaagaaccacacctcccctgacgtcgacctgggcgacatctcaggaatcaacgcttccgtcgtgaacatccagaaggagatcgaccgcctgaacgaagtggccaagaacctgaacgaaagcctgatcgacctgcaggagctgggcaagtacgaacagtacatcaagtggccttggtacatctggctgggtttcatcgctggcctcatcgctatcgtgatggtgaccatcatgctgtgctgcatgacttcatgctgctcctgcctgaagggctgctgcagctgcggatcttgctgcaagttcgacgaggacgactctgaacccgtcctgaagggcgtgaagctgcactacacctaa

SEQ ID NO: 97 - protein, 4 aa, synthetic construct
  REGION 1..4: note = Recombinant Furin Cleavage Site
GSAS

SEQ ID NO: 98 - protein, 8 aa, synthetic construct
  REGION 1..8: note = HRV3C Cleavage Site
LEVLFQGP

SEQ ID NO: 99 - protein, 8 aa, synthetic construct
  REGION 1..8: note = Strep-tag
WSHPQFEK

SEQ ID NO: 100 - protein, 6 aa, synthetic construct
  REGION 1..6: note = 6X-His Tag
HHHHHH

SEQ ID NO: 101 - protein, 10 aa, synthetic construct
  REGION 1..10: note = His-Tag
  SITE 6: note = May be present or absent
  SITE 7: note = May be present or absent
  SITE 8: note = May be present or absent
  SITE 9: note = May be present or absent
  SITE 10: note = May be present or absent
HHHHHHHHHH

SEQ ID NO: 102 - protein, 8 aa, synthetic construct
  REGION 1..8: note = 8X-His Tag
HHHHHHHH

SEQ ID NO: 103 - protein, 30 aa, synthetic construct
  REGION 1..30: note = FOLDON
GYIPEAPRDGQAYVRKDGEWVLLSTFLSPA

SEQ ID NO: 104 - protein, 10 aa, synthetic construct
  REGION 1..10: note = RECOMBINANT SPIKE PROTEIN
EDLLFNKVTL

SEQ ID NO: 105 - protein, 1263 aa, synthetic construct
  REGION 1..1263: note = RECOMBINANT SPIKE PROTEIN
MFVFLVLLPLVSSQCVNLTTRTQLPPAYTNSFTRGVYYPDKVFRSSVLHSTQDLFLPFFSNVTWFHAIHVSGTNGTKRFDNPVLPFNDGVYFASTEKSNIIRGWIFGTTLDSKTQSLLIVNNATNVVIKVCEFQFCNDPFLGVYYHKNNKSWMESEFRVYSSANNCTFEYVSQPFLMDLEGKQGNFKNLREFVFKNIDGYFKIYSKHTPINLVRDLPQGFSALEPLVDLPIGINITRFQTLLALHRSYLTPGDSSSGWTAGAAAYYVGYLQPRTFLLKYNENGTITDAVDCALDPLSETKCTLKSFTVEKGIYQTSNFRVQPTESIVRFPNITNLCPFGEVFNATRFASVYAWNRKRISNCVADYSVLYNSASFSTFKCYGVSPTKLNDLCFTNVYADSFVIRGDEVRQIAPGQTGKIADYNYKLPDDFTGCVIAWNSNNLDSKVGGNYNYLYRLFRKSNLKPFERDISTEIYQAGSTPCNGVEGFNCYFPLQSYGFQPTNGVGYQPYRVVVLSFELLHAPATVCGPKKSTNLVKNKCVNFNFNGLTGTGVLTESNKKFLPFQQFGRDIADTTDAVRDPQTLEILDITPCSFGGVSVITPGTNTSNQVAVLYQDVNCTEVPVAIHADQLTPTWRVYSTGSNVFQTRAGCLIGAEHVNNSYECDIPIGAGICASYQTQTNSPQQAQSVASQSIIAYTMSLGAENSVAYSNNSIAIPTNFTISVTTEILPVSMTKTSVDCTMYICGDSTECSNLLLQYGSFCTQLNRALTGIAVEQDKNTQEVFAQVKQIYKTPPIKDFGGFNFSQILPDPSKPSKRSFIADAGFIKQYGDCLGDIAARDLICAQKFNGLTVLPPLLTDEMIAQYTSALLAGTITSGWTFGAGAALQIPFAMQMAYRFNGIGVTQNVLYENQKLIANQFNSAIGKIQDSLSSTASALGKLQDVVNQNAQALNTLVKQLSSNFGAISSVLNDILSRLDPPEAEVQIDRLITGRLQSLQTYVTQQLIRAAEIRASANLAATKMSECVLGQSKRVDFCGKGYHLMSFPQSAPHGVVFLHVTYVPAQEKNFTTAPAICHDGKAHFPREGVFVSNGTHWFVTQRNFYEPQIITTDNTFVSGNCDVVIGIVNNTVYDPLQPELDSFKEELDKYFKNHTSPDVDLGDISGINASVVNIQKEIDRLNEVAKNLNESLIDLQELGKYEQYIKWPWYIWLGFIAGLIAIVMVTIMLCCMTSCCSCLKGCCSCGSCCKFDEDDSEPVLKGVKLHYT

SEQ ID NO: 106 - protein, 1250 aa, synthetic construct
  REGION 1..1250: note = RECOMBINANT SPIKE PROTEIN
QCVNLTTRTQLPPAYTNSFTRGVYYPDKVFRSSVLHSTQDLFLPFFSNVTWFHAIHVSGTNGTKRFDNPVLPFNDGVYFASTEKSNIIRGWIFGTTLDSKTQSLLIVNNATNVVIKVCEFQFCNDPFLGVYYHKNNKSWMESEFRVYSSANNCTFEYVSQPFLMDLEGKQGNFKNLREFVFKNIDGYFKIYSKHTPINLVRDLPQGFSALEPLVDLPIGINITRFQTLLALHRSYLTPGDSSSGWTAGAAAYYVGYLQPRTFLLKYNENGTITDAVDCALDPLSETKCTLKSFTVEKGIYQTSNFRVQPTESIVRFPNITNLCPFGEVFNATRFASVYAWNRKRISNCVADYSVLYNSASFSTFKCYGVSPTKLNDLCFTNVYADSFVIRGDEVRQIAPGQTGKIADYNYKLPDDFTGCVIAWNSNNLDSKVGGNYNYLYRLFRKSNLKPFERDISTEIYQAGSTPCNGVEGFNCYFPLQSYGFQPTNGVGYQPYRVVVLSFELLHAPATVCGPKKSTNLVKNKCVNFNFNGLTGTGVLTESNKKFLPFQQFGRDIADTTDAVRDPQTLEILDITPCSFGGVSVITPGTNTSNQVAVLYQDVNCTEVPVAIHADQLTPTWRVYSTGSNVFQTRAGCLIGAEHVNNSYECDIPIGAGICASYQTQTNSPQQAQSVASQSIIAYTMSLGAENSVAYSNNSIAIPTNFTISVTTEILPVSMTKTSVDCTMYICGDSTECSNLLLQYGSFCTQLNRALTGIAVEQDKNTQEVFAQVKQIYKTPPIKDFGGFNFSQILPDPSKPSKRSFIADAGFIKQYGDCLGDIAARDLICAQKFNGLTVLPPLLTDEMIAQYTSALLAGTITSGWTFGAGAALQIPFAMQMAYRFNGIGVTQNVLYENQKLIANQFNSAIGKIQDSLSSTASALGKLQDVVNQNAQALNTLVKQLSSNFGAISSVLNDILSRLDPPEAEVQIDRLITGRLQSLQTYVTQQLIRAAEIRASANLAATKMSECVLGQSKRVDFCGKGYHLMSFPQSAPHGVVFLHVTYVPAQEKNFTTAPAICHDGKAHFPREGVFVSNGTHWFVTQRNFYEPQIITTDNTFVSGNCDVVIGIVNNTVYDPLQPELDSFKEELDKYFKNHTSPDVDLGDISGINASVVNIQKEIDRLNEVAKNLNESLIDLQELGKYEQYIKWPWYIWLGFIAGLIAIVMVTIMLCCMTSCCSCLKGCCSCGSCCKFDEDDSEPVLKGVKLHYT

SEQ ID NO: 107 - protein, 1263 aa, synthetic construct
  REGION 1..1263: note = RECOMBINANT SPIKE PROTEIN
MFVFLVLLPLVSSQCVNLTTRTQLPPAYTNSFTRGVYYPDKVFRSSVLHSTQDLFLPFFSNVTWFHAIHVSGTNGTKRFDNPVLPFNDGVYFASTEKSNIIRGWIFGTTLDSKTQSLLIVNNATNVVIKVCEFQFCNDPFLGVYYHKNNKSWMESEFRVYSSANNCTFEYVSQPFLMDLEGKQGNFKNLREFVFKNIDGYFKIYSKHTPINLVRDLPQGFSALEPLVDLPIGINITRFQTLLALHRSYLTPGDSSSGWTAGAAAYYVGYLQPRTFLLKYNENGTITDAVDCALDPLSETKCTLKSFTVEKGIYQTSNFRVQPTESIVRFPNITNLCPFGEVFNATRFASVYAWNRKRISNCVADYSVLYNSASFSTFKCYGVSPTKLNDLCFTNVYADSFVIRGDEVRQIAPGQTGKIADYNYKLPDDFTGCVIAWNSNNLDSKVGGNYNYLYRLFRKSNLKPFERDISTEIYQAGSTPCNGVEGFNCYFPLQSYGFQPTNGVGYQPYRVVVLSFELLHAPATVCGPKKSTNLVKNKCVNFNFNGLTGTGVLTESNKKFLPFQQFGRDIADTTDAVRDPQTLEILDITPCSFGGVSVITPGTNTSNQVAVLYQDVNCTEVPVAIHADQLTPTWRVYSTGSNVFQTRAGCLIGAEHVNNSYECDIPIGAGICASYQTQTNSPRRARSVASQSIIAYTMSLGAENSVAYSNNSIAIPTNFTISVTTEILPVSMTKTSVDCTMYICGDSTECSNLLLQYGSFCTQLNRALTGIAVEQDKNTQEVFAQVKQIYKTPPIKDFGGFNFSQILPDPSKPSKRSFIADAGFIKQYGDCLGDIAARDLICAQKFNGLTVLPPLLTDEMIAQYTSALLAGTITSGWTFGAGAALQIPFAMQMAYRFNGIGVTQNVLYENQKLIANQFNSAIGKIQDSLSSTASALGKLQDVVNQNAQALNTLVKQLSSNFGAISSVLNDILSRLDKVEAEVQIDRLITGRLQSLQTYVTQQLIRAAEIRASANLAATKMSECVLGQSKRVDFCGKGYHLMSFPQSAPHGVVFLHVTYVPAQEKNFTTAPAICHDGKAHFPREGVFVSNGTHWFVTQRNFYEPQIITTDNTFVSGNCDVVIGIVNNTVYDPLQPELDSFKEELDKYFKNHTSPDVDLGDISGINASVVNIQKEIDRLNEVAKNLNESLIDLQELGKYEQYIKWPWYIWLGFIAGLIAIVMVTIMLCCMTSCCSCLKGCCSCGSCCKFDEDDSEPVLKGVKLHYT

SEQ ID NO: 108 - protein, 1250 aa, synthetic construct
  REGION 1..1250: note = RECOMBINANT SPIKE PROTEIN
QCVNLTTRTQLPPAYTNSFTRGVYYPDKVFRSSVLHSTQDLFLPFFSNVTWFHAIHVSGTNGTKRFDNPVLPFNDGVYFASTEKSNIIRGWIFGTTLDSKTQSLLIVNNATNVVIKVCEFQFCNDPFLGVYYHKNNKSWMESEFRVYSSANNCTFEYVSQPFLMDLEGKQGNFKNLREFVFKNIDGYFKIYSKHTPINLVRDLPQGFSALEPLVDLPIGINITRFQTLLALHRSYLTPGDSSSGWTAGAAAYYVGYLQPRTFLLKYNENGTITDAVDCALDPLSETKCTLKSFTVEKGIYQTSNFRVQPTESIVRFPNITNLCPFGEVFNATRFASVYAWNRKRISNCVADYSVLYNSASFSTFKCYGVSPTKLNDLCFTNVYADSFVIRGDEVRQIAPGQTGKIADYNYKLPDDFTGCVIAWNSNNLDSKVGGNYNYLYRLFRKSNLKPFERDISTEIYQAGSTPCNGVEGFNCYFPLQSYGFQPTNGVGYQPYRVVVLSFELLHAPATVCGPKKSTNLVKNKCVNFNFNGLTGTGVLTESNKKFLPFQQFGRDIADTTDAVRDPQTLEILDITPCSFGGVSVITPGTNTSNQVAVLYQDVNCTEVPVAIHADQLTPTWRVYSTGSNVFQTRAGCLIGAEHVNNSYECDIPIGAGICASYQTQTNSPRRARSVASQSIIAYTMSLGAENSVAYSNNSIAIPTNFTISVTTEILPVSMTKTSVDCTMYICGDSTECSNLLLQYGSFCTQLNRALTGIAVEQDKNTQEVFAQVKQIYKTPPIKDFGGFNFSQILPDPSKPSKRSFIADAGFIKQYGDCLGDIAARDLICAQKFNGLTVLPPLLTDEMIAQYTSALLAGTITSGWTFGAGAALQIPFAMQMAYRFNGIGVTQNVLYENQKLIANQFNSAIGKIQDSLSSTASALGKLQDVVNQNAQALNTLVKQLSSNFGAISSVLNDILSRLDKVEAEVQIDRLITGRLQSLQTYVTQQLIRAAEIRASANLAATKMSECVLGQSKRVDFCGKGYHLMSFPQSAPHGVVFLHVTYVPAQEKNFTTAPAICHDGKAHFPREGVFVSNGTHWFVTQRNFYEPQIITTDNTFVSGNCDVVIGIVNNTVYDPLQPELDSFKEELDKYFKNHTSPDVDLGDISGINASVVNIQKEIDRLNEVAKNLNESLIDLQELGKYEQYIKWPWYIWLGFIAGLIAIVMVTIMLCCMTSCCSCLKGCCSCGSCCKFDEDDSEPVLKGVKLHYT

SEQ ID NO: 109 - protein, 1273 aa, synthetic construct
  REGION 1..1273: note = Recombinant CoV S polypeptide
MFVFLVLLPLVSSQCVNLTTRTQLPPAYTNSFTRGVYYPDKVFRSSVLHSTQDLFLPFFSNVTWFHAIHVSGTNGTKRFDNPVLPFNDGVYFASTEKSNIIRGWIFGTTLDSKTQSLLIVNNATNVVIKVCEFQFCNDPFLGVYYHKNNKSWMESEFRVYSSANNCTFEYVSQPFLMDLEGKQGNFKNLREFVFKNIDGYFKIYSKHTPINLVRDLPQGFSALEPLVDLPIGINITRFQTLLALHRSYLTPGDSSSGWTAGAAAYYVGYLQPRTFLLKYNENGTITDAVDCALDPLSETKCTLKSFTVEKGIYQTSNFRVQPTESIVRFPNITNLCPFGEVFNATRFASVYAWNRKRISNCVADYSVLYNSASFSTFKCYGVSPTKLNDLCFTNVYADSFVIRGDEVRQIAPGQTGKIADYNYKLPDDFTGCVIAWNSNNLDSKVGGNYNYLYRLFRKSNLKPFERDISTEIYQAGSTPCNGVEGFNCYFPLQSYGFQPTNGVGYQPYRVVVLSFELLHAPATVCGPKKSTNLVKNKCVNFNFNGLTGTGVLTESNKKFLPFQQFGRDIADTTDAVRDPQTLEILDITPCSFGGVSVITPGTNTSNQVAVLYQDVNCTEVPVAIHADQLTPTWRVYSTGSNVFQTRAGCLIGAEHVNNSYECDIPIGAGICASYQTQTNSPGSASSVASQSIIAYTMSLGAENSVAYSNNSIAIPTNFTISVTTEILPVSMTKTSVDCTMYICGDSTECSNLLLQYGSFCTQLNRALTGIAVEQDKNTQEVFAQVKQIYKTPPIKDFGGFNFSQILPDPSKPSKRSFIEDLLFNKVTLADAGFIKQYGDCLGDIAARDLICAQKFNGLTVLPPLLTDEMIAQYTSALLAGTITSGWTFGAGAALQIPFAMQMAYRFNGIGVTQNVLYENQKLIANQFNSAIGKIQDSLSSTASALGKLQDVVNQNAQALNTLVKQLSSNFGAISSVLNDILSRLDPPEAEVQIDRLITGRLQSLQTYVTQQLIRAAEIRASANLAATKMSECVLGQSKRVDFCGKGYHLMSFPQSAPHGVVFLHVTYVPAQEKNFTTAPAICHDGKAHFPREGVFVSNGTHWFVTQRNFYEPQIITTDNTFVSGNCDVVIGIVNNTVYDPLQPELDSFKEELDKYFKNHTSPDVDLGDISGINASVVNIQKEIDRLNEVAKNLNESLIDLQELGKYEQYIKWPWYIWLGFIAGLIAIVMVTIMLCCMTSCCSCLKGCCSCGSCCKFDEDDSEPVLKGVKLHYT

SEQ ID NO: 110 - protein, 1260 aa, synthetic construct
  REGION 1..1260: note = Recombinant CoV S polypeptide
QCVNLTTRTQLPPAYTNSFTRGVYYPDKVFRSSVLHSTQDLFLPFFSNVTWFHAIHVSGTNGTKRFDNPVLPFNDGVYFASTEKSNIIRGWIFGTTLDSKTQSLLIVNNATNVVIKVCEFQFCNDPFLGVYYHKNNKSWMESEFRVYSSANNCTFEYVSQPFLMDLEGKQGNFKNLREFVFKNIDGYFKIYSKHTPINLVRDLPQGFSALEPLVDLPIGINITRFQTLLALHRSYLTPGDSSSGWTAGAAAYYVGYLQPRTFLLKYNENGTITDAVDCALDPLSETKCTLKSFTVEKGIYQTSNFRVQPTESIVRFPNITNLCPFGEVFNATRFASVYAWNRKRISNCVADYSVLYNSASFSTFKCYGVSPTKLNDLCFTNVYADSFVIRGDEVRQIAPGQTGKIADYNYKLPDDFTGCVIAWNSNNLDSKVGGNYNYLYRLFRKSNLKPFERDISTEIYQAGSTPCNGVEGFNCYFPLQSYGFQPTNGVGYQPYRVVVLSFELLHAPATVCGPKKSTNLVKNKCVNFNFNGLTGTGVLTESNKKFLPFQQFGRDIADTTDAVRDPQTLEILDITPCSFGGVSVITPGTNTSNQVAVLYQDVNCTEVPVAIHADQLTPTWRVYSTGSNVFQTRAGCLIGAEHVNNSYECDIPIGAGICASYQTQTNSPGSASSVASQSIIAYTMSLGAENSVAYSNNSIAIPTNFTISVTTEILPVSMTKTSVDCTMYICGDSTECSNLLLQYGSFCTQLNRALTGIAVEQDKNTQEVFAQVKQIYKTPPIKDFGGFNFSQILPDPSKPSKRSFIEDLLFNKVTLADAGFIKQYGDCLGDIAARDLICAQKFNGLTVLPPLLTDEMIAQYTSALLAGTITSGWTFGAGAALQIPFAMQMAYRFNGIGVTQNVLYENQKLIANQFNSAIGKIQDSLSSTASALGKLQDVVNQNAQALNTLVKQLSSNFGAISSVLNDILSRLDPPEAEVQIDRLITGRLQSLQTYVTQQLIRAAEIRASANLAATKMSECVLGQSKRVDFCGKGYHLMSFPQSAPHGVVFLHVTYVPAQEKNFTTAPAICHDGKAHFPREGVFVSNGTHWFVTQRNFYEPQIITTDNTFVSGNCDVVIGIVNNTVYDPLQPELDSFKEELDKYFKNHTSPDVDLGDISGINASVVNIQKEIDRLNEVAKNLNESLIDLQELGKYEQYIKWPWYIWLGFIAGLIAIVMVTIMLCCMTSCCSCLKGCCSCGSCCKFDEDDSEPVLKGVKLHYT

SEQ ID NO: 111 - protein, 4 aa, synthetic construct
  REGION 1..4: note = Recombinant Furin Cleavage Site
GSGA

SEQ ID NO: 112 - protein, 1260 aa, synthetic construct
  REGION 1..1260: note = Recombinant SARS-CoV-2 spike protein
QCVNLTTRTQLPPAYTNSFTRGVYYPDKVFRSSVLHSTQDLFLPFFSNVTWFHAIHVSGTNGTKRFDNPVLPFNDGVYFASTEKSNIIRGWIFGTTLDSKTQSLLIVNNATNVVIKVCEFQFCNDPFLGVYYHKNNKSWMESEFRVYSSANNCTFEYVSQPFLMDLEGKQGNFKNLREFVFKNIDGYFKIYSKHTPINLVRDLPQGFSALEPLVDLPIGINITRFQTLLALHRSYLTPGDSSSGWTAGAAAYYVGYLQPRTFLLKYNENGTITDAVDCALDPLSETKCTLKSFTVEKGIYQTSNFRVQPTESIVRFPNITNLCPFGEVFNATRFASVYAWNRKRISNCVADYSVLYNSASFSTFKCYGVSPTKLNDLCFTNVYADSFVIRGDEVRQIAPGQTGKIADYNYKLPDDFTGCVIAWNSNNLDSKVGGNYNYLYRLFRKSNLKPFERDISTEIYQAGSTPCNGVEGFNCYFPLQSYGFQPTYGVGYQPYRVVVLSFELLHAPATVCGPKKSTNLVKNKCVNFNFNGLTGTGVLTESNKKFLPFQQFGRDIADTTDAVRDPQTLEILDITPCSFGGVSVITPGTNTSNQVAVLYQDVNCTEVPVAIHADQLTPTWRVYSTGSNVFQTRAGCLIGAEHVNNSYECDIPIGAGICASYQTQTNSPQQAQSVASQSIIAYTMSLGAENSVAYSNNSIAIPTNFTISVTTEILPVSMTKTSVDCTMYICGDSTECSNLLLQYGSFCTQLNRALTGIAVEQDKNTQEVFAQVKQIYKTPPIKDFGGFNFSQILPDPSKPSKRSFIEDLLFNKVTLADAGFIKQYGDCLGDIAARDLICAQKFNGLTVLPPLLTDEMIAQYTSALLAGTITSGWTFGAGAALQIPFAMQMAYRFNGIGVTQNVLYENQKLIANQFNSAIGKIQDSLSSTASALGKLQDVVNQNAQALNTLVKQLSSNFGAISSVLNDILSRLDPPEAEVQIDRLITGRLQSLQTYVTQQLIRAAEIRASANLAATKMSECVLGQSKRVDFCGKGYHLMSFPQSAPHGVVFLHVTYVPAQEKNFTTAPAICHDGKAHFPREGVFVSNGTHWFVTQRNFYEPQIITTDNTFVSGNCDVVIGIVNNTVYDPLQPELDSFKEELDKYFKNHTSPDVDLGDISGINASVVNIQKEIDRLNEVAKNLNESLIDLQELGKYEQYIKWPWYIWLGFIAGLIAIVMVTIMLCCMTSCCSCLKGCCSCGSCCKFDEDDSEPVLKGVKLHYT

SEQ ID NO: 113 - protein, 1260 aa, synthetic construct
  REGION 1..1260: note = Recombinant SARS-CoV-2 spike protein
QCVNLTTRTQLPPAYTNSFTRGVYYPDKVFRSSVLHSTQDLFLPFFSNVTWFHAIHVSGTNGTKRFDNPVLPFNDGVYFASTEKSNIIRGWIFGTTLDSKTQSLLIVNNATNVVIKVCEFQFCNDPFLGVYYHKNNKSWMESEFRVYSSANNCTFEYVSQPFLMDLEGKQGNFKNLREFVFKNIDGYFKIYSKHTPINLVRDLPQGFSALEPLVDLPIGINITRFQTLLALHRSYLTPGDSSSGWTAGAAAYYVGYLQPRTFLLKYNENGTITDAVDCALDPLSETKCTLKSFTVEKGIYQTSNFRVQPTESIVRFPNITNLCPFGEVFNATRFASVYAWNRKRISNCVADYSVLYNSASFSTFKCYGVSPTKLNDLCFTNVYADSFVIRGDEVRQIAPGQTGKIADYNYKLPDDFTGCVIAWNSNNLDSKVGGNYNYLYRLFRKSNLKPFERDISTEIYQAGSTPCNGVEGFNCYFPLQSYGFQPTYGVGYQPYRVVVLSFELLHAPATVCGPKKSTNLVKNKCVNFNFNGLTGTGVLTESNKKFLPFQQFGRDIADTTDAVRDPQTLEILDITPCSFGGVSVITPGTNTSNQVAVLYQGVNCTEVPVAIHADQLTPTWRVYSTGSNVFQTRAGCLIGAEHVNNSYECDIPIGAGICASYQTQTNSPQQAQSVASQSIIAYTMSLGAENSVAYSNNSIAIPTNFTISVTTEILPVSMTKTSVDCTMYICGDSTECSNLLLQYGSFCTQLNRALTGIAVEQDKNTQEVFAQVKQIYKTPPIKDFGGFNFSQILPDPSKPSKRSFIEDLLFNKVTLADAGFIKQYGDCLGDIAARDLICAQKFNGLTVLPPLLTDEMIAQYTSALLAGTITSGWTFGAGAALQIPFAMQMAYRFNGIGVTQNVLYENQKLIANQFNSAIGKIQDSLSSTASALGKLQDVVNQNAQALNTLVKQLSSNFGAISSVLNDILSRLDPPEAEVQIDRLITGRLQSLQTYVTQQLIRAAEIRASANLAATKMSECVLGQSKRVDFCGKGYHLMSFPQSAPHGVVFLHVTYVPAQEKNFTTAPAICHDGKAHFPREGVFVSNGTHWFVTQRNFYEPQIITTDNTFVSGNCDVVIGIVNNTVYDPLQPELDSFKEELDKYFKNHTSPDVDLGDISGINASVVNIQKEIDRLNEVAKNLNESLIDLQELGKYEQYIKWPWYIWLGFIAGLIAIVMVTIMLCCMTSCCSCLKGCCSCGSCCKFDEDDSEPVLKGVKLHYT

SEQ ID NO: 114 - protein, 1257 aa, synthetic construct
  REGION 1..1257: note = Recombinant SARS-CoV-2 spike protein
QCVNLTTRTQLPPAYTNSFTRGVYYPDKVFRSSVLHSTQDLFLPFFSNVTWFHAISGTNGTKRFDNPVLPFNDGVYFASTEKSNIIRGWIFGTTLDSKTQSLLIVNNATNVVIKVCEFQFCNDPFLGVYHKNNKSWMESEFRVYSSANNCTFEYVSQPFLMDLEGKQGNFKNLREFVFKNIDGYFKIYSKHTPINLVRDLPQGFSALEPLVDLPIGINITRFQTLLALHRSYLTPGDSSSGWTAGAAAYYVGYLQPRTFLLKYNENGTITDAVDCALDPLSETKCTLKSFTVEKGIYQTSNFRVQPTESIVRFPNITNLCPFGEVFNATRFASVYAWNRKRISNCVADYSVLYNSASFSTFKCYGVSPTKLNDLCFTNVYADSFVIRGDEVRQIAPGQTGKIADYNYKLPDDFTGCVIAWNSNNLDSKVGGNYNYLYRLFRKSNLKPFERDISTEIYQAGSTPCNGVEGFNCYFPLQSYGFQPTYGVGYQPYRVVVLSFELLHAPATVCGPKKSTNLVKNKCVNFNFNGLTGTGVLTESNKKFLPFQQFGRDIDDTTDAVRDPQTLEILDITPCSFGGVSVITPGTNTSNQVAVLYQGVNCTEVPVAIHADQLTPTWRVYSTGSNVFQTRAGCLIGAEHVNNSYECDIPIGAGICASYQTQTNSHQQAQSVASQSIIAYTMSLGAENSVAYSNNSIAIPINFTISVTTEILPVSMTKTSVDCTMYICGDSTECSNLLLQYGSFCTQLNRALTGIAVEQDKNTQEVFAQVKQIYKTPPIKDFGGFNFSQILPDPSKPSKRSFIEDLLFNKVTLADAGFIKQYGDCLGDIAARDLICAQKFNGLTVLPPLLTDEMIAQYTSALLAGTITSGWTFGAGAALQIPFAMQMAYRFNGIGVTQNVLYENQKLIANQFNSAIGKIQDSLSSTASALGKLQDVVNQNAQALNTLVKQLSSNFGAISSVLNDILARLDPPEAEVQIDRLITGRLQSLQTYVTQQLIRAAEIRASANLAATKMSECVLGQSKRVDFCGKGYHLMSFPQSAPHGVVFLHVTYVPAQEKNFTTAPAICHDGKAHFPREGVFVSNGTHWFVTQRNFYEPQIITTHNTFVSGNCDVVIGIVNNTVYDPLQPELDSFKEELDKYFKNHTSPDVDLGDISGINASVVNIQKEIDRLNEVAKNLNESLIDLQELGKYEQYIKWPWYIWLGFIAGLIAIVMVTIMLCCMTSCCSCLKGCCSCGSCCKFDEDDSEPVLKGVKLHYT

SEQ ID NO: 115 - protein, 1260 aa, synthetic construct
  REGION 1..1260: note = Recombinant SARS-CoV-2 spike protein
QCVNLTTRTQLPPAYTNSFTRGVYYPDKVFRSSVLHSTQDLFLPFFSNVTWFHAIHVSGTNGTKRFANPVLPFNDGVYFASTEKSNIIRGWIFGTTLDSKTQSLLIVNNATNVVIKVCEFQFCNDPFLGVYYHKNNKSWMESEFRVYSSANNCTFEYVSQPFLMDLEGKQGNFKNLREFVFKNIDGYFKIYSKHTPINLVRGLPQGFSALEPLVDLPIGINITRFQTLHALHRSYLTPGDSSSGWTAGAAAYYVGYLQPRTFLLKYNENGTITDAVDCALDPLSETKCTLKSFTVEKGIYQTSNFRVQPTESIVRFPNITNLCPFGEVFNATRFASVYAWNRKRISNCVADYSVLYNSASFSTFKCYGVSPTKLNDLCFTNVYADSFVIRGDEVRQIAPGQTGNIADYNYKLPDDFTGCVIAWNSNNLDSKVGGNYNYLYRLFRKSNLKPFERDISTEIYQAGSTPCNGVKGFNCYFPLQSYGFQPTYGVGYQPYRVVVLSFELLHAPATVCGPKKSTNLVKNKCVNFNFNGLTGTGVLTESNKKFLPFQQFGRDIADTTDAVRDPQTLEILDITPCSFGGVSVITPGTNTSNQVAVLYQGVNCTEVPVAIHADQLTPTWRVYSTGSNVFQTRAGCLIGAEHVNNSYECDIPIGAGICASYQTQTNSPQQAQSVASQSIIAYTMSLGVENSVAYSNNSIAIPTNFTISVTTEILPVSMTKTSVDCTMYICGDSTECSNLLLQYGSFCTQLNRALTGIAVEQDKNTQEVFAQVKQIYKTPPIKDFGGFNFSQILPDPSKPSKRSFIEDLLFNKVTLADAGFIKQYGDCLGDIAARDLICAQKFNGLTVLPPLLTDEMIAQYTSALLAGTITSGWTFGAGAALQIPFAMQMAYRFNGIGVTQNVLYENQKLIANQFNSAIGKIQDSLSSTASALGKLQDVVNQNAQALNTLVKQLSSNFGAISSVLNDILSRLDPPEAEVQIDRLITGRLQSLQTYVTQQLIRAAEIRASANLAATKMSECVLGQSKRVDFCGKGYHLMSFPQSAPHGVVFLHVTYVPAQEKNFTTAPAICHDGKAHFPREGVFVSNGTHWFVTQRNFYEPQIITTDNTFVSGNCDVVIGIVNNTVYDPLQPELDSFKEELDKYFKNHTSPDVDLGDISGINASVVNIQKEIDRLNEVAKNLNESLIDLQELGKYEQYIKWPWYIWLGFIAGLIAIVMVTIMLCCMTSCCSCLKGCCSCGSCCKFDEDDSEPVLKGVKLHYT

SEQ ID NO: 116 - protein, 196 aa, Severe acute respiratory syndrome-related coronavirus
LCPFGEVFNATRFASVYAWNRKRISNCVADYSVLYNSASFSTFKCYGVSPTKLNDLCFTNVYADSFVIRGDEVRQIAPGQTGKIADYNYKLPDDFTGCVIAWNSNNLDSKVGGNYNYLYRLFRKSNLKPFERDISTEIYQAGSTPCNGVEGFNCYFPLQSYGFQPTNGVGYQPYRVVVLSFELLHAPATVCGPKKS

SEQ ID NO: 117 - protein, 13 aa, synthetic construct
  REGION 1..13: note = signal peptide
MFVFLVLLPLVSI

SEQ ID NO: 118 - protein, 292 aa, Severe acute respiratory syndrome-related coronavirus
QCVNLTTRTQLPPAYTNSFTRGVYYPDKVFRSSVLHSTQDLFLPFFSNVTWFHAIHVSGTNGTKRFDNPVLPFNDGVYFASTEKSNIIRGWIFGTTLDSKTQSLLIVNNATNVVIKVCEFQFCNDPFLGVYYHKNNKSWMESEFRVYSSANNCTFEYVSQPFLMDLEGKQGNFKNLREFVFKNIDGYFKIYSKHTPINLVRDLPQGFSALEPLVDLPIGINITRFQTLLALHRSYLTPGDSSSGWTAGAAAYYVGYLQPRTFLLKYNENGTITDAVDCALDPLSETKCTLKS

SEQ ID NO: 119 - protein, 83 aa, Severe acute respiratory syndrome-related coronavirus
MAYRFNGIGVTQNVLYENQKLIANQFNSAIGKIQDSLSSTASALGKLQDVVNQNAQALNTLVKQLSSNFGAISSVLNDILSRL

SEQ ID NO: 120 - protein, 588 aa, Severe acute respiratory syndrome-related coronavirus
SVASQSIIAYTMSLGAENSVAYSNNSIAIPTNFTISVTTEILPVSMTKTSVDCTMYICGDSTECSNLLLQYGSFCTQLNRALTGIAVEQDKNTQEVFAQVKQIYKTPPIKDFGGFNFSQILPDPSKPSKRSFIEDLLFNKVTLADAGFIKQYGDCLGDIAARDLICAQKFNGLTVLPPLLTDEMIAQYTSALLAGTITSGWTFGAGAALQIPFAMQMAYRFNGIGVTQNVLYENQKLIANQFNSAIGKIQDSLSSTASALGKLQDVVNQNAQALNTLVKQLSSNFGAISSVLNDILSRLDKVEAEVQIDRLITGRLQSLQTYVTQQLIRAAEIRASANLAATKMSECVLGQSKRVDFCGKGYHLMSFPQSAPHGVVFLHVTYVPAQEKNFTTAPAICHDGKAHFPREGVFVSNGTHWFVTQRNFYEPQIITTDNTFVSGNCDVVIGIVNNTVYDPLQPELDSFKEELDKYFKNHTSPDVDLGDISGINASVVNIQKEIDRLNEVAKNLNESLIDLQELGKYEQYIKWPWYIWLGFIAGLIAIVMVTIMLCCMTSCCSCLKGCCSCGSCCKFDEDDSEPVLKGVKLHYT

SEQ ID NO: 121 - protein, 672 aa, Severe acute respiratory syndrome-related coronavirus
QCVNLTTRTQLPPAYTNSFTRGVYYPDKVFRSSVLHSTQDLFLPFFSNVTWFHAIHVSGTNGTKRFDNPVLPFNDGVYFASTEKSNIIRGWIFGTTLDSKTQSLLIVNNATNVVIKVCEFQFCNDPFLGVYYHKNNKSWMESEFRVYSSANNCTFEYVSQPFLMDLEGKQGNFKNLREFVFKNIDGYFKIYSKHTPINLVRDLPQGFSALEPLVDLPIGINITRFQTLLALHRSYLTPGDSSSGWTAGAAAYYVGYLQPRTFLLKYNENGTITDAVDCALDPLSETKCTLKSFTVEKGIYQTSNFRVQPTESIVRFPNITNLCPFGEVFNATRFASVYAWNRKRISNCVADYSVLYNSASFSTFKCYGVSPTKLNDLCFTNVYADSFVIRGDEVRQIAPGQTGKIADYNYKLPDDFTGCVIAWNSNNLDSKVGGNYNYLYRLFRKSNLKPFERDISTEIYQAGSTPCNGVEGFNCYFPLQSYGFQPTNGVGYQPYRVVVLSFELLHAPATVCGPKKSTNLVKNKCVNFNFNGLTGTGVLTESNKKFLPFQQFGRDIADTTDAVRDPQTLEILDITPCSFGGVSVITPGTNTSNQVAVLYQDVNCTEVPVAIHADQLTPTWRVYSTGSNVFQTRAGCLIGAEHVNNSYECDIPIGAGICASYQTQTNSPRRAR

SEQ ID NO: 122 - protein, 140 aa, Severe acute respiratory syndrome-related coronavirus
NFNGLTGTGVLTESNKKFLPFQQFGRDIADTTDAVRDPQTLEILDITPCSFGGVSVITPGTNTSNQVAVLYQDVNCTEVPVAIHADQLTPTWRVYSTGSNVFQTRAGCLIGAEHVNNSYECDIPIGAGICASYQTQTNSP

SEQ ID NO: 123 - protein, 24 aa, Severe acute respiratory syndrome-related coronavirus
WYIWLGFIAGLIAIVMVTIMLCCM

SEQ ID NO: 124 - protein, 36 aa, Severe acute respiratory syndrome-related coronavirus
TSCCSCLKGCCSCGSCCKFDEDDSEPVLKGVKLHYT

SEQ ID NO: 125 - protein, 51 aa, Severe acute respiratory syndrome-related coronavirus
DVDLGDISGINASVVNIQKEIDRLNEVAKNLNESLIDLQELGKYEQYIKWP

SEQ ID NO: 126 - protein, 197 aa, Severe acute respiratory syndrome-related coronavirus
NITNLCPFGEVFNATRFASVYAWNRKRISNCVADYSVLYNSASFSTFKCYGVSPTKLNDLCFTNVYADSFVIRGDEVRQIAPGQTGKIADYNYKLPDDFTGCVIAWNSNNLDSKVGGNYNYLYRLFRKSNLKPFERDISTEIYQAGSTPCNGVEGFNCYFPLQSYGFQPTNGVGYQPYRVVVLSFELLHAPATVCGP

SEQ ID NO: 127 - skipped

SEQ ID NO: 128 - protein, 4 aa, synthetic construct
  REGION 1..4: note = inactivated furin cleavage site
GGGG

SEQ ID NO: 129 - protein, 5 aa, synthetic construct
  REGION 1..5: note = inactivated furin cleavage site
GGGGG

SEQ ID NO: 130 - protein, 1272 aa, synthetic construct
  REGION 1..1272: note = modified coronavirus S polypeptide
MFVFLVLLPLVSSQCVNLTTRTQLPPAYTNSFTRGVYYPDKVFRSSVLHSTQDLFLPFFSNVTWFHAIHVSGTNGTKRFANPVLPFNDGVYFASTEKSNIIRGWIFGTTLDSKTQSLLIVNNATNVVIKVCEFQFCNDPFLGVYYHKNNKSWMESEFRVYSSANNCTFEYVSQPFLMDLEGKQGNFKNLREFVFKNIDGYFKIYSKHTPINLVRGLPQGFSALEPLVDLPIGINITRFQTLHALHRSYLTPGDSSSGWTAGAAAYYVGYLQPRTFLLKYNENGTITDAVDCALDPLSETKCTLKSFTVEKGIYQTSNFRVQPTESIVRFPNITNLCPFGEVFNATRFASVYAWNRKRISNCVADYSVLYNSASFSTFKCYGVSPTKLNDLCFTNVYADSFVIRGDEVRQIAPGQTGNIADYNYKLPDDFTGCVIAWNSNNLDSKVGGNYNYLYRLFRKSNLKPFERDISTEIYQAGSTPCNGVKGFNCYFPLQSYGFQPTYGVGYQPYRVVVLSFELLHAPATVCGPKKSTNLVKNKCVNFNFNGLTGTGVLTESNKKFLPFQQFGRDIADTTDAVRDPQTLEILDITPCSFGGVSVITPGTNTSNQVAVLYQGVNCTEVPVAIHADQLTPTWRVYSTGSNVFQTRAGCLIGAEHVNNSYECDIPIGAGICASYQTQTNSPQQAQSVASQSIIAYTMSLGVENSVAYSNNSIAIPTNFTISVTTEILPVSMTKTSVDCTMYICGDSTECSNLLLQYGSFCTQLNRALTGIAVEQDKNTQEVFAQVKQIYKTPPIKDFGGNFSQILPDPSKPSKRSFIEDLLFNKVTLADAGFIKQYGDCLGDIAARDLICAQKFNGLTVLPPLLTDEMIAQYTSALLAGTITSGWTFGAGAALQIPFAMQMAYRFNGIGVTQNVLYENQKLIANQFNSAIGKIQDSLSSTASALGKLQDVVNQNAQALNTLVKQLSSNFGAISSVLNDILSRLDPPEAEVQIDRLITGRLQSLQTYVTQQLIRAAEIRASANLAATKMSECVLGQSKRVDFCGKGYHLMSFPQSAPHGVVFLHVTYVPAQEKNFTTAPAICHDGKAHFPREGVFVSNGTHWFVTQRNFYEPQIITTDNTFVSGNCDVVIGIVNNTVYDPLQPELDSFKEELDKYFKNHTSPDVDLGDISGINASVVNIQKEIDRLNEVAKNLNESLIDLQELGKYEQYIKWPWYIWLGFIAGLIAIVMVTIMLCCMTSCCSCLKGCCSCGSCCKFDEDDSEPVLKGVKLHYT

SEQ ID NO: 131 - DNA, 3822 bp, synthetic construct
  misc_feature 1..3822: note = modified coronavirus S polypeptide
  source 1..3822: mol_type = other DNA
atgttcgtcttcctggtgctgctgcctctggtgtccagccagtgcgtgaacctgaccactaggactcagctgcctcccgcttacaccaactcattcactaggggtgtgtactacccagacaaggtcttccgctcctcagtgctgcactcaactcaggacctgttcctgcctttcttctccaacgtcacctggttccacgctatccacgtgtccggcaccaacggcactaagaggttcgccaaccccgtgctgccattcaacgacggagtctacttcgcttcaaccgagaagtccaacatcatcagaggatggatcttcggcaccactctggacagcaagactcagtctctgctgatcgtcaacaacgctaccaacgtggtcatcaaggtgtgcgaattccagttctgtaacgaccccttcctgggtgtctactaccacaagaacaacaagtcatggatggagtccgaattccgcgtctactccagcgctaacaactgcactttcgagtacgtgtcccagccattcctgatggacctggaaggaaagcagggtaacttcaagaacctgcgcgagttcgtgttcaagaacatcgacggctacttcaagatttacagcaagcacacccccatcaacctggtccgtggcctgccacagggattctctgctctggagcccctggtggacctgccaatcggcatcaacatcaccaggttccagactctgcacgccctgcacagatcctacctgactcccggagactcttcatccggttggaccgctggcgctgccgcttactacgtgggttacctgcagccacgcaccttcctgctgaagtacaacgaaaacggcaccatcactgacgccgtcgactgcgctctggacccactgtcagaaaccaagtgcactctgaagtccttcaccgtggagaagggaatctaccagacttcaaacttccgcgtgcagcctaccgaatccatcgtccgtttcccaaacatcactaacctgtgccctttcggagaggtcttcaacgccacccgcttcgcttccgtgtacgcctggaaccgcaagcgtatctcaaactgcgtcgctgactactccgtgctgtacaactcagcctccttcagcaccttcaagtgctacggagtgtcacccactaagctgaacgacctgtgcttcaccaacgtctacgctgactccttcgtgatccgcggtgacgaggtccgtcagatcgctccaggccagactggaaacatcgccgactacaactacaagctgcctgacgacttcaccggttgcgtcatcgcctggaacagcaacaacctggactctaaagtgggtggcaactacaactacctgtacaggctgttcagaaagtcaaacctgaagcccttcgagcgcgacatcagcactgaaatctaccaggctggttctaccccatgcaacggtgtcaagggcttcaactgctacttccctctgcagtcctacggcttccagcccacttacggtgtgggctaccagccataccgtgtggtcgtgctgagcttcgagctgctgcacgcccctgctactgtgtgcggacccaagaagtctaccaacctggtcaagaacaagtgcgtgaacttcaacttcaacggtctgaccggaactggtgtcctgaccgagagcaacaagaagttcctgcctttccagcagttcggtcgcgacatcgctgacaccactgacgccgtgcgtgaccctcagaccctggaaatcctggacatcactccctgctcattcggaggtgtctccgtgatcactcccggaaccaacacttctaaccaggtcgctgtgctgtaccagggtgtgaactgcaccgaagtcccagtggccatccacgctgaccagctgacccctacttggagggtgtactccaccggcagcaacgtcttccagactagagctggatgcctgatcggtgccgagcacgtcaacaacagctacgaatgcgacatccctatcggcgctggaatctgcgcctcttaccagacccagactaacagcccccagcaggctcagtctgtggcctctcagtcaatcatcgcctacaccatgtcactgggtgtcgaaaactccgtggcttactctaacaactcaatcgccatccctaccaacttcactatcagcgtgaccactgagatcctgcccgtcagcatgaccaagacttctgtggactgcactatgtacatctgcggcgacagcaccgaatgctctaacctgctgctgcagtacggttctttctgcacccagctgaaccgcgctctgactggcatcgccgtggagcaggacaagaacactcaggaagtcttcgctcaggtgaagcaaatctacaagaccccacctatcaaggacttcggcggattcaacttctcccagatcctgccagacccttccaagcccagcaagaggtctttcatcgaggacctgctgttcaacaaggtcactctggccgacgctggtttcatcaagcagtacggcgactgcctgggagacatcgctgctcgcgacctgatctgcgcccagaagttcaacggcctgaccgtgctgcccccactgctgactgacgaaatgatcgctcagtacactagcgccctgctggctggcaccatcacttcaggttggactttcggtgctggtgctgctctgcagatcccattcgctatgcagatggcctaccgtttcaacggaatcggtgtcacccagaacgtgctgtacgagaaccagaagctgatcgctaaccagttcaactcagccatcggcaagatccaggacagcctgagctctactgcctctgctctgggaaagctgcaggacgtcgtgaaccagaacgcccaggctctgaacaccctggtcaagcagctgtcatccaacttcggcgccatcagctctgtgctgaacgacatcctgtccaggctggaccctcccgaggctgaagtccagatcgacaggctgatcactggaagactgcagtcactgcagacctacgtgactcagcagctgatccgcgccgctgaaatccgtgcctccgctaacctggccgctaccaagatgagcgagtgcgtcctgggccagtctaagagagtggacttctgcggcaagggataccacctgatgtcattcccacagtccgcccctcacggagtcgtgttcctgcacgtcacctacgtgcccgctcaggagaagaacttcaccactgccccagctatctgccacgacggcaaggctcacttccctcgcgaaggagtcttcgtgagcaacggcacccactggttcgtcactcagcgtaacttctacgagccccagatcatcaccactgacaacactttcgtgtctggcaactgcgacgtggtcatcggtatcgtcaacaacaccgtgtacgaccctctgcagcccgagctggactcattcaaggaagagctggacaagtacttcaagaaccacacctcccctgacgtcgacctgggtgacatctcaggcatcaacgcctccgtcgtgaacatccagaaggagatcgaccgcctgaacgaagtggctaagaacctgaacgaaagcctgatcgacctgcaggagctgggcaagtacgaacagtacatcaagtggccatggtacatctggctgggattcatcgctggcctcatcgctatcgtgatggtgaccatcatgctgtgctgcatgacttcatgctgctcctgcctgaagggttgctgcagctgcggctcttgctgcaagttcgacgaggacgactctgaacctgtcctgaagggagtgaagctgcactacacctaa

SEQ ID NO: 132 - protein, 1259 aa, synthetic construct
  REGION 1..1259: note = modified coronavirus S polypeptide
QCVNLTTRTQLPPAYTNSFTRGVYYPDKVFRSSVLHSTQDLFLPFFSNVTWFHAIHVSGTNGTKRFANPVLPFNDGVYFASTEKSNIIRGWIFGTTLDSKTQSLLIVNNATNVVIKVCEFQFCNDPFLGVYYHKNNKSWMESEFRVYSSANNCTFEYVSQPFLMDLEGKQGNFKNLREFVFKNIDGYFKIYSKHTPINLVRGLPQGFSALEPLVDLPIGINITRFQTLHALHRSYLTPGDSSSGWTAGAAAYYVGYLQPRTFLLKYNENGTITDAVDCALDPLSETKCTLKSFTVEKGIYQTSNFRVQPTESIVRFPNITNLCPFGEVFNATRFASVYAWNRKRISNCVADYSVLYNSASFSTFKCYGVSPTKLNDLCFTNVYADSFVIRGDEVRQIAPGQTGNIADYNYKLPDDFTGCVIAWNSNNLDSKVGGNYNYLYRLFRKSNLKPFERDISTEIYQAGSTPCNGVKGFNCYFPLQSYGFQPTYGVGYQPYRVVVLSFELLHAPATVCGPKKSTNLVKNKCVNFNFNGLTGTGVLTESNKKFLPFQQFGRDIADTTDAVRDPQTLEILDITPCSFGGVSVITPGTNTSNQVAVLYQGVNCTEVPVAIHADQLTPTWRVYSTGSNVFQTRAGCLIGAEHVNNSYECDIPIGAGICASYQTQTNSPQQAQSVASQSIIAYTMSLGVENSVAYSNNSIAIPTNFTISVTTEILPVSMTKTSVDCTMYICGDSTECSNLLLQYGSFCTQLNRALTGIAVEQDKNTQEVFAQVKQIYKTPPIKDFGGNFSQILPDPSKPSKRSFIEDLLFNKVTLADAGFIKQYGDCLGDIAARDLICAQKFNGLTVLPPLLTDEMIAQYTSALLAGTITSGWTFGAGAALQIPFAMQMAYRFNGIGVTQNVLYENQKLIANQFNSAIGKIQDSLSSTASALGKLQDVVNQNAQALNTLVKQLSSNFGAISSVLNDILSRLDPPEAEVQIDRLITGRLQSLQTYVTQQLIRAAEIRASANLAATKMSECVLGQSKRVDFCGKGYHLMSFPQSAPHGVVFLHVTYVPAQEKNFTTAPAICHDGKAHFPREGVFVSNGTHWFVTQRNFYEPQIITTDNTFVSGNCDVVIGIVNNTVYDPLQPELDSFKEELDKYFKNHTSPDVDLGDISGINASVVNIQKEIDRLNEVAKNLNESLIDLQELGKYEQYIKWPWYIWLGFIAGLIAIVMVTIMLCCMTSCCSCLKGCCSCGSCCKFDEDDSEPVLKGVKLHYT

SEQ ID NO: 133 - protein, 1258 aa, synthetic construct
  REGION 1..1258: note = modified coronavirus S polypeptide
QCVNLTTRTQLPPAYTNSFTRGVYYPDKVFRSSVLHSTQDLFLPFFSNVTWFHAIHVSGTNGTKRFDNPVLPFNDGVYFASTEKSNIIRGWIFGTTLDSKTQSLLIVNNATNVVIKVCEFQFCNDPFLGVYYHKNNKSWMESEFRVYSSANNCTFEYVSQPFLMDLEGKQGNFKNLREFVFKNIDGYFKIYSKHTPINLVRDLPQGFSALEPLVDLPIGINITRFQTLLALHRSYLTPGDSSSGWTAGAAAYYVGYLQPRTFLLKYNENGTITDAVDCALDPLSETKCTLKSFTVEKGIYQTSNFRVQPTESIVRFPNITNLCPFGEVFNATRFASVYAWNRKRISNCVADYSVLYNSASFSTFKCYGVSPTKLNDLCFTNVYADSFVIRGDEVRQIAPGQTGKIADYNYKLPDDFTGCVIAWNSNNLDSKVGGNYNYLYRLFRKSNLKPFERDISTEIYQAGSTPCNGVEGFNCYFPLQSYGFQPTNGVGYQPYRVVVLSFELLHAPATVCGPKKSTNLVKNKCVNFNFNGLTGTGVLTESNKKFLPFQQFGRDIADTTDAVRDPQTLEILDITPCSFGGVSVITPGTNTSNQVAVLYQGVNCTEVPVAIHADQLTPTWRVYSTGSNVFQTRAGCLIGAEHVNNSYECDIPIGAGICASYQTQTNSPGGSVASQSIIAYTMSLGAENSVAYSNNSIAIPTNFTISVTTEILPVSMTKTSVDCTMYICGDSTECSNLLLQYGSFCTQLNRALTGIAVEQDKNTQEVFAQVKQIYKTPPIKDFGGFNFSQILPDPSKPSKRSFIEDLLFNKVTLADAGFIKQYGDCLGDIAARDLICAQKFNGLTVLPPLLTDEMIAQYTSALLAGTITSGWTFGAGAALQIPFAMQMAYRFNGIGVTQNVLYENQKLIANQFNSAIGKIQDSLSSTASALGKLQDVVNQNAQALNTLVKQLSSNFGAISSVLNDILSRLDPPEAEVQIDRLITGRLQSLQTYVTQQLIRAAEIRASANLAATKMSECVLGQSKRVDFCGKGYHLMSFPQSAPHGVVFLHVTYVPAQEKNFTTAPAICHDGKAHFPREGVFVSNGTHWFVTQRNFYEPQIITTDNTFVSGNCDVVIGIVNNTVYDPLQPELDSFKEELDKYFKNHTSPDVDLGDISGINASVVNIQKEIDRLNEVAKNLNESLIDLQELGKYEQYIKWPWYIWLGFIAGLIAIVMVTIMLCCMTSCCSCLKGCCSCGSCCKFDEDDSEPVLKGVKLHYT

SEQ ID NO: 134 - protein, 1271 aa, synthetic construct
  REGION 1..1271: note = modified coronavirus S polypeptide
MFVFLVLLPLVSSQCVNLTTRTQLPPAYTNSFTRGVYYPDKVFRSSVLHSTQDLFLPFFSNVTWFHAIHVSGTNGTKRFDNPVLPFNDGVYFASTEKSNIIRGWIFGTTLDSKTQSLLIVNNATNVVIKVCEFQFCNDPFLGVYYHKNNKSWMESEFRVYSSANNCTFEYVSQPFLMDLEGKQGNFKNLREFVFKNIDGYFKIYSKHTPINLVRDLPQGFSALEPLVDLPIGINITRFQTLLALHRSYLTPGDSSSGWTAGAAAYYVGYLQPRTFLLKYNENGTITDAVDCALDPLSETKCTLKSFTVEKGIYQTSNFRVQPTESIVRFPNITNLCPFGEVFNATRFASVYAWNRKRISNCVADYSVLYNSASFSTFKCYGVSPTKLNDLCFTNVYADSFVIRGDEVRQIAPGQTGKIADYNYKLPDDFTGCVIAWNSNNLDSKVGGNYNYLYRLFRKSNLKPFERDISTEIYQAGSTPCNGVEGFNCYFPLQSYGFQPTNGVGYQPYRVVVLSFELLHAPATVCGPKKSTNLVKNKCVNFNFNGLTGTGVLTESNKKFLPFQQFGRDIADTTDAVRDPQTLEILDITPCSFGGVSVITPGTNTSNQVAVLYQGVNCTEVPVAIHADQLTPTWRVYSTGSNVFQTRAGCLIGAEHVNNSYECDIPIGAGICASYQTQTNSPGGSVASQSIIAYTMSLGAENSVAYSNNSIAIPTNFTISVTTEILPVSMTKTSVDCTMYICGDSTECSNLLLQYGSFCTQLNRALTGIAVEQDKNTQEVFAQVKQIYKTPPIKDFGGFNFSQILPDPSKPSKRSFIEDLLFNKVTLADAGFIKQYGDCLGDIAARDLICAQKFNGLTVLPPLLTDEMIAQYTSALLAGTITSGWTFGAGAALQIPFAMQMAYRFNGIGVTQNVLYENQKLIANQFNSAIGKIQDSLSSTASALGKLQDVVNQNAQALNTLVKQLSSNFGAISSVLNDILSRLDPPEAEVQIDRLITGRLQSLQTYVTQQLIRAAEIRASANLAATKMSECVLGQSKRVDFCGKGYHLMSFPQSAPHGVVFLHVTYVPAQEKNFTTAPAICHDGKAHFPREGVFVSNGTHWFVTQRNFYEPQIITTDNTFVSGNCDVVIGIVNNTVYDPLQPELDSFKEELDKYFKNHTSPDVDLGDISGINASVVNIQKEIDRLNEVAKNLNESLIDLQELGKYEQYIKWPWYIWLGFIAGLIAIVMVTIMLCCMTSCCSCLKGCCSCGSCCKFDEDDSEPVLKGVKLHYT

SEQ ID NO: 135 - protein, 3813 aa, synthetic construct
  REGION 1..3813: note = modified coronavirus S polypeptide
ATGTTCGTCTTCCTGGTGCTGCTGCCTCTGGTGTCCAGCCAGTGCGTGAACCTGACCACTAGGACTCAGCTGCCTCCCGCTTACACCAACAGCTTCACTAGGGGTGTCTACTACCCTGACAAGGTCTTCCGCTCCTCAGTGCTGCACTCTACTCAGGACCTGTTCCTGCCCTTCTTCTCAAACGTGACCTGGTTCCACGCCATCTCCGGCACCAACGGCACTAAGAGGTTCGACAACCCCGTGCTGCCATTCAACGACGGCGTCTACTTCGCTTCAACCGAGAAGTCCAACATCATCAGAGGATGGATCTTCGGCACCACTCTGGACAGCAAGACTCAGTCTCTGCTGATCGTCAACAACGCCACCAACGTGGTCATCAAGGTGTGCGAATTCCAGTTCTGCAACGACCCATTCCTGGGTGTGTACCACAAGAACAACAAGTCATGGATGGAGTCCGAATTCCGCGTCTACTCCAGCGCTAACAACTGCACTTTCGAGTACGTGAGCCAGCCTTTCCTGATGGACCTGGAAGGAAAGCAGGGTAACTTCAAGAACCTGCGCGAGTTCGTGTTCAAGAACATCGACGGATACTTCAAGATTTACAGCAAGCACACCCCCATCAACCTGGTCCGTGACCTGCCACAGGGTTTCTCTGCTCTGGAGCCCCTGGTGGACCTGCCAATCGGCATCAACATCACCAGGTTCCAGACTCTGCTGGCTCTGCACCGCTCCTACCTGACTCCAGGTGACTCATCTTCTGGATGGACTGCTGGAGCTGCTGCTTACTACGTGGGTTACCTGCAGCCTCGCACCTTCCTGCTGAAGTACAACGAAAACGGCACCATCACTGACGCCGTCGACTGCGCTCTGGACCCTCTGTCAGAAACCAAGTGCACTCTGAAGTCCTTCACCGTGGAGAAGGGTATCTACCAGACTAGCAACTTCCGCGTGCAGCCCACCGAATCTATCGTCCGTTTCCCAAACATCACTAACCTGTGCCCTTTCGGCGAGGTCTTCAACGCCACCCGCTTCGCTTCCGTGTACGCCTGGAACCGCAAGCGTATCTCAAACTGCGTCGCTGACTACTCCGTGCTGTACAACTCAGCCTCCTTCAGCACCTTCAAGTGCTACGGTGTGTCACCCACTAAGCTGAACGACCTGTGCTTCACCAACGTCTACGCCGACTCCTTCGTGATCCGCGGCGACGAGGTCCGTCAGATCGCTCCAGGCCAGACTGGAAAGATCGCCGACTACAACTACAAGCTGCCTGACGACTTCACCGGCTGCGTCATCGCTTGGAACAGCAACAACCTGGACTCTAAAGTGGGTGGCAACTACAACTACCTGTACAGGCTGTTCAGAAAGAGCAACCTGAAGCCCTTCGAGCGCGACATCAGCACTGAAATCTACCAGGCTGGCTCTACCCCATGCAACGGTGTCGAGGGCTTCAACTGCTACTTCCCTCTGCAGTCTTACGGATTCCAGCCCACTTACGGTGTGGGCTACCAGCCATACCGTGTGGTCGTGCTGAGCTTCGAACTGCTGCACGCCCCTGCTACTGTGTGCGGACCCAAGAAGTCTACCAACCTGGTCAAGAACAAGTGCGTGAACTTCAACTTCAACGGTCTGACCGGAACTGGTGTCCTGACCGAGAGCAACAAGAAGTTCCTGCCCTTCCAGCAGTTCGGTCGCGACATCGACGACACCACTGACGCCGTGCGTGACCCTCAGACCCTGGAAATCCTGGACATCACTCCCTGCTCATTCGGAGGTGTCTCCGTGATCACTCCAGGAACCAACACTTCTAACCAGGTCGCTGTGCTGTACCAGGGTGTCAACTGCACCGAGGTCCCAGTGGCCATCCACGCTGACCAGCTGACCCCTACTTGGAGGGTGTACTCCACCGGCAGCAACGTGTTCCAGACTAGAGCTGGTTGCCTGATCGGCGCCGAGCACGTGAACAACAGCTACGAATGCGACATCCCAATCGGCGCTGGAATCTGCGCCTCTTACCAGACCCAGACTAACAGCCACCAGCAGGCTCAGTCTGTCGCCTCTCAGTCAATCATCGCTTACACTATGTCACTGGGCGCTGAAAACTCCGTGGCCTACTCTAACAACTCAATCGCCATCCCTATCAACTTCACCATCTCAGTGACCACTGAGATCCTGCCCGTCAGCATGACCAAGACTTCTGTGGACTGCACTATGTACATCTGCGGAGACAGCACCGAATGCTCTAACCTGCTGCTGCAGTACGGCTCCTTCTGCACCCAGCTGAACCGCGCTCTGACTGGAATCGCCGTGGAGCAGGACAAGAACACTCAGGAAGTCTTCGCTCAGGTGAAGCAAATCTACAAGACCCCACCTATCAAGGACTTCGGCGGATTCAACTTCTCCCAGATCCTGCCAGACCCTTCCAAGCCAAGCAAGAGGTCTTTCATCGAGGACCTGCTGTTCAACAAGGTCACCCTGGCCGACGCTGGCTTCATCAAGCAGTACGGAGACTGCCTGGGTGACATCGCCGCTCGCGACCTGATCTGCGCTCAGAAGTTCAACGGACTGACCGTGCTGCCCCCACTGCTGACTGACGAAATGATCGCCCAGTACACTTCAGCCCTGCTGGCTGGAACCATCACTTCTGGTTGGACCTTCGGTGCTGGTGCTGCTCTGCAGATCCCTTTCGCTATGCAGATGGCCTACCGTTTCAACGGAATCGGTGTCACCCAGAACGTGCTGTACGAGAACCAGAAGCTGATCGCTAACCAGTTCAACTCCGCCATCGGCAAGATCCAGGACAGCCTGAGCTCTACTGCCTCTGCTCTGGGAAAGCTGCAGGACGTCGTGAACCAGAACGCCCAGGCTCTGAACACCCTGGTCAAGCAGCTGTCATCCAACTTCGGAGCCATCAGCTCTGTGCTGAACGACATCCTCGCTAGGCTGGACCCTCCCGAGGCTGAAGTCCAGATCGACAGGCTGATCACTGGTAGACTGCAGTCACTGCAGACCTACGTGACTCAGCAGCTGATCCGCGCCGCTGAAATCCGTGCCTCCGCTAACCTGGCCGCTACCAAGATGAGCGAGTGCGTCCTGGGACAGTCTAAGAGAGTGGACTTCTGCGGCAAGGGATACCACCTGATGTCATTCCCACAGTCCGCTCCTCACGGTGTCGTGTTCCTGCACGTCACCTACGTGCCCGCCCAGGAGAAGAACTTCACCACTGCCCCAGCTATCTGCCACGACGGCAAGGCTCACTTCCCCCGCGAAGGTGTCTTCGTGTCAAACGGCACCCACTGGTTCGTCACTCAGCGTAACTTCTACGAGCCACAGATCATCACCACTCACAACACTTTCGTGTCCGGAAACTGCGACGTGGTCATCGGTATCGTCAACAACACCGTGTACGACCCTCTGCAGCCCGAGCTGGACTCATTCAAGGAAGAGCTGGACAAGTACTTCAAGAACCACACCTCCCCTGACGTCGACCTGGGCGACATCTCAGGAATCAACGCTTCCGTCGTGAACATCCAGAAGGAGATCGACCGCCTGAACGAAGTGGCCAAGAACCTGAACGAATCACTGATCGACCTGCAGGAGCTGGGCAAGTACGAACAGTACATCAAGTGGCCTTGGTACATCTGGCTGGGTTTCATCGCTGGCCTCATCGCTATCGTGATGGTGACCATCATGCTGTGCTGCATGACTTCATGCTGCTCCTGCCTGAAGGGCTGCTGCAGCTGCGGATCTTGCTGCAAGTTCGACGAGGACGACTCCGAACCCGTCCTGAAGGGAGTGAAGCTGCACTACACCTAA

SEQ ID NO: 136 - protein, 1270 aa, synthetic construct
  REGION 1..1270: note = modified coronavirus S polypeptide
MFVFLVLLPLVSSQCVNLTTRTQLPPAYTNSFTRGVYYPDKVFRSSVLHSTQDLFLPFFSNVTWFHAISGTNGTKRFDNPVLPFNDGVYFASTEKSNIIRGWIFGTTLDSKTQSLLIVNNATNVVIKVCEFQFCNDPFLGVYHKNNKSWMESEFRVYSSANNCTFEYVSQPFLMDLEGKQGNFKNLREFVFKNIDGYFKIYSKHTPINLVRDLPQGFSALEPLVDLPIGINITRFQTLLALHRSYLTPGDSSSGWTAGAAAYYVGYLQPRTFLLKYNENGTITDAVDCALDPLSETKCTLKSFTVEKGIYQTSNFRVQPTESIVRFPNITNLCPFGEVFNATRFASVYAWNRKRISNCVADYSVLYNSASFSTFKCYGVSPTKLNDLCFTNVYADSFVIRGDEVRQIAPGQTGKIADYNYKLPDDFTGCVIAWNSNNLDSKVGGNYNYLYRLFRKSNLKPFERDISTEIYQAGSTPCNGVEGFNCYFPLQSYGFQPTYGVGYQPYRVVVLSFELLHAPATVCGPKKSTNLVKNKCVNFNFNGLTGTGVLTESNKKFLPFQQFGRDIDDTTDAVRDPQTLEILDITPCSFGGVSVITPGTNTSNQVAVLYQGVNCTEVPVAIHADQLTPTWRVYSTGSNVFQTRAGCLIGAEHVNNSYECDIPIGAGICASYQTQTNSHQQAQSVASQSIIAYTMSLGAENSVAYSNNSIAIPINFTISVTTEILPVSMTKTSVDCTMYICGDSTECSNLLLQYGSFCTQLNRALTGIAVEQDKNTQEVFAQVKQIYKTPPIKDFGGFNFSQILPDPSKPSKRSFIEDLLFNKVTLADAGFIKQYGDCLGDIAARDLICAQKFNGLTVLPPLLTDEMIAQYTSALLAGTITSGWTFGAGAALQIPFAMQMAYRFNGIGVTQNVLYENQKLIANQFNSAIGKIQDSLSSTASALGKLQDVVNQNAQALNTLVKQLSSNFGAISSVLNDILARLDPPEAEVQIDRLITGRLQSLQTYVTQQLIRAAEIRASANLAATKMSECVLGQSKRVDFCGKGYHLMSFPQSAPHGVVFLHVTYVPAQEKNFTTAPAICHDGKAHFPREGVFVSNGTHWFVTQRNFYEPQIITTHNTFVSGNCDVVIGIVNNTVYDPLQPELDSFKEELDKYFKNHTSPDVDLGDISGINASVVNIQKEIDRLNEVAKNLNESLIDLQELGKYEQYIKWPWYIWLGFIAGLIAIVMVTIMLCCMTSCCSCLKGCCSCGSCCKFDEDDSEPVLKGVKLHYT

SEQ ID NO: 137 - protein, 1268 aa, synthetic construct
  REGION 1..1268: note = modified coronavirus S polypeptide
MFVFLVLLPLVSSQCVNLTTRTQLPPAYTNSFTRGVYYPDKVFRSSVLHSTQDLFLPFFSNVTWFHAISGTNGTKRFDNPVLPFNDGVYFASTEKSNIIRGWIFGTTLDSKTQSLLIVNNATNVVIKVCEFQFCNDPFLGVYHKNNKSWMESEFRVYSSANNCTFEYVSQPFLMDLEGKQGNFKNLREFVFKNIDGYFKIYSKHTPINLVRDLPQGFSALEPLVDLPIGINITRFQTLLALHRSYLTPGDSSSGWTAGAAAYYVGYLQPRTFLLKYNENGTITDAVDCALDPLSETKCTLKSFTVEKGIYQTSNFRVQPTESIVRFPNITNLCPFGEVFNATRFASVYAWNRKRISNCVADYSVLYNSASFSTFKCYGVSPTKLNDLCFTNVYADSFVIRGDEVRQIAPGQTGKIADYNYKLPDDFTGCVIAWNSNNLDSKVGGNYNYLYRLFRKSNLKPFERDISTEIYQAGSTPCNGVEGFNCYFPLQSYGFQPTYGVGYQPYRVVVLSFELLHAPATVCGPKKSTNLVKNKCVNFNFNGLTGTGVLTESNKKFLPFQQFGRDIDDTTDAVRDPQTLEILDITPCSFGGVSVITPGTNTSNQVAVLYQGVNCTEVPVAIHADQLTPTWRVYSTGSNVFQTRAGCLIGAEHVNNSYECDIPIGAGICASYQTQTNSHGGSVASQSIIAYTMSLGAENSVAYSNNSIAIPINFTISVTTEILPVSMTKTSVDCTMYICGDSTECSNLLLQYGSFCTQLNRALTGIAVEQDKNTQEVFAQVKQIYKTPPIKDFGGFNFSQILPDPSKPSKRSFIEDLLFNKVTLADAGFIKQYGDCLGDIAARDLICAQKFNGLTVLPPLLTDEMIAQYTSALLAGTITSGWTFGAGAALQIPFAMQMAYRFNGIGVTQNVLYENQKLIANQFNSAIGKIQDSLSSTASALGKLQDVVNQNAQALNTLVKQLSSNFGAISSVLNDILARLDPPEAEVQIDRLITGRLQSLQTYVTQQLIRAAEIRASANLAATKMSECVLGQSKRVDFCGKGYHLMSFPQSAPHGVVFLHVTYVPAQEKNFTTAPAICHDGKAHFPREGVFVSNGTHWFVTQRNFYEPQIITTHNTFVSGNCDVVIGIVNNTVYDPLQPELDSFKEELDKYFKNHTSPDVDLGDISGINASVVNIQKEIDRLNEVAKNLNESLIDLQELGKYEQYIKWPWYIWLGFIAGLIAIVMVTIMLCCMTSCCSCLKGCCSCGSCCKFDEDDSEPVLKGVKLHYT

SEQ ID NO: 138 - protein, 1255 aa, synthetic construct
  REGION 1..1255: note = modified coronavirus S polypeptide
QCVNLTTRTQLPPAYTNSFTRGVYYPDKVFRSSVLHSTQDLFLPFFSNVTWFHAISGTNGTKRFDNPVLPFNDGVYFASTEKSNIIRGWIFGTTLDSKTQSLLIVNNATNVVIKVCEFQFCNDPFLGVYHKNNKSWMESEFRVYSSANNCTFEYVSQPFLMDLEGKQGNFKNLREFVFKNIDGYFKIYSKHTPINLVRDLPQGFSALEPLVDLPIGINITRFQTLLALHRSYLTPGDSSSGWTAGAAAYYVGYLQPRTFLLKYNENGTITDAVDCALDPLSETKCTLKSFTVEKGIYQTSNFRVQPTESIVRFPNITNLCPFGEVFNATRFASVYAWNRKRISNCVADYSVLYNSASFSTFKCYGVSPTKLNDLCFTNVYADSFVIRGDEVRQIAPGQTGKIADYNYKLPDDFTGCVIAWNSNNLDSKVGGNYNYLYRLFRKSNLKPFERDISTEIYQAGSTPCNGVEGFNCYFPLQSYGFQPTYGVGYQPYRVVVLSFELLHAPATVCGPKKSTNLVKNKCVNFNFNGLTGTGVLTESNKKFLPFQQFGRDIDDTTDAVRDPQTLEILDITPCSFGGVSVITPGTNTSNQVAVLYQGVNCTEVPVAIHADQLTPTWRVYSTGSNVFQTRAGCLIGAEHVNNSYECDIPIGAGICASYQTQTNSHGGSVASQSIIAYTMSLGAENSVAYSNNSIAIPINFTISVTTEILPVSMTKTSVDCTMYICGDSTECSNLLLQYGSFCTQLNRALTGIAVEQDKNTQEVFAQVKQIYKTPPIKDFGGFNFSQILPDPSKPSKRSFIEDLLFNKVTLADAGFIKQYGDCLGDIAARDLICAQKFNGLTVLPPLLTDEMIAQYTSALLAGTITSGWTFGAGAALQIPFAMQMAYRFNGIGVTQNVLYENQKLIANQFNSAIGKIQDSLSSTASALGKLQDVVNQNAQALNTLVKQLSSNFGAISSVLNDILARLDPPEAEVQIDRLITGRLQSLQTYVTQQLIRAAEIRASANLAATKMSECVLGQSKRVDFCGKGYHLMSFPQSAPHGVVFLHVTYVPAQEKNFTTAPAICHDGKAHFPREGVFVSNGTHWFVTQRNFYEPQIITTHNTFVSGNCDVVIGIVNNTVYDPLQPELDSFKEELDKYFKNHTSPDVDLGDISGINASVVNIQKEIDRLNEVAKNLNESLIDLQELGKYEQYIKWPWYIWLGFIAGLIAIVMVTIMLCCMTSCCSCLKGCCSCGSCCKFDEDDSEPVLKGVKLHYT

SEQ ID NO: 139 - DNA, 3807 bp, synthetic construct
  misc_feature 1..3807: note = modified coronavirus S polypeptide
  source 1..3807: mol_type = other DNA
atgttcgtcttcctggtgctgctgcctctggtgtccagccagtgcgtgaacctgaccactaggactcagctgcctcccgcttacaccaacagcttcactaggggtgtctactaccctgacaaggtcttccgctcctcagtgctgcactctactcaggacctgttcctgcccttcttctcaaacgtgacctggttccacgccatctccggcaccaacggcactaagaggttcgacaaccccgtgctgccattcaacgacggcgtctacttcgcttcaaccgagaagtccaacatcatcagaggatggatcttcggcaccactctggacagcaagactcagtctctgctgatcgtcaacaacgccaccaacgtggtcatcaaggtgtgcgaattccagttctgcaacgacccattcctgggtgtgtaccacaagaacaacaagtcatggatggagtccgaattccgcgtctactccagcgctaacaactgcactttcgagtacgtgagccagcctttcctgatggacctggaaggaaagcagggtaacttcaagaacctgcgcgagttcgtgttcaagaacatcgacggatacttcaagatttacagcaagcacacccccatcaacctggtccgtgacctgccacagggtttctctgctctggagcccctggtggacctgccaatcggcatcaacatcaccaggttccagactctgctggctctgcaccgctcctacctgactccaggtgactcatcttctggatggactgctggagctgctgcttactacgtgggttacctgcagcctcgcaccttcctgctgaagtacaacgaaaacggcaccatcactgacgccgtcgactgcgctctggaccctctgtcagaaaccaagtgcactctgaagtccttcaccgtggagaagggtatctaccagactagcaacttccgcgtgcagcccaccgaatctatcgtccgtttcccaaacatcactaacctgtgccctttcggcgaggtcttcaacgccacccgcttcgcttccgtgtacgcctggaaccgcaagcgtatctcaaactgcgtcgctgactactccgtgctgtacaactcagcctccttcagcaccttcaagtgctacggtgtgtcacccactaagctgaacgacctgtgcttcaccaacgtctacgccgactccttcgtgatccgcggcgacgaggtccgtcagatcgctccaggccagactggaaagatcgccgactacaactacaagctgcctgacgacttcaccggctgcgtcatcgcttggaacagcaacaacctggactctaaagtgggtggcaactacaactacctgtacaggctgttcagaaagagcaacctgaagcccttcgagcgcgacatcagcactgaaatctaccaggctggctctaccccatgcaacggtgtcgagggcttcaactgctacttccctctgcagtcttacggattccagcccacttacggtgtgggctaccagccataccgtgtggtcgtgctgagcttcgaactgctgcacgcccctgctactgtgtgcggacccaagaagtctaccaacctggtcaagaacaagtgcgtgaacttcaacttcaacggtctgaccggaactggtgtcctgaccgagagcaacaagaagttcctgcccttccagcagttcggtcgcgacatcgacgacaccactgacgccgtgcgtgaccctcagaccctggaaatcctggacatcactccctgctcattcggaggtgtctccgtgatcactccaggaaccaacacttctaaccaggtcgctgtgctgtaccagggtgtcaactgcaccgaggtcccagtggccatccacgctgaccagctgacccctacttggagggtgtactccaccggcagcaacgtgttccagactagagctggttgcctgatcggcgccgagcacgtgaacaacagctacgaatgcgacatcccaatcggcgctggaatctgcgcctcttaccagacccagactaacagccacggtggttctgtcgcctctcagtcaatcatcgcttacactatgtcactgggcgctgaaaactccgtggcctactctaacaactcaatcgccatccctatcaacttcaccatctcagtgaccactgagatcctgcccgtcagcatgaccaagacttctgtggactgcactatgtacatctgcggagacagcaccgaatgctctaacctgctgctgcagtacggctccttctgcacccagctgaaccgcgctctgactggaatcgccgtggagcaggacaagaacactcaggaagtcttcgctcaggtgaagcaaatctacaagaccccacctatcaaggacttcggcggattcaacttctcccagatcctgccagacccttccaagccaagcaagaggtctttcatcgaggacctgctgttcaacaaggtcaccctggccgacgctggcttcatcaagcagtacggagactgcctgggtgacatcgccgctcgcgacctgatctgcgctcagaagttcaacggactgaccgtgctgcccccactgctgactgacgaaatgatcgcccagtacacttcagccctgctggctggaaccatcacttctggttggaccttcggtgctggtgctgctctgcagatccctttcgctatgcagatggcctaccgtttcaacggaatcggtgtcacccagaacgtgctgtacgagaaccagaagctgatcgctaaccagttcaactccgccatcggcaagatccaggacagcctgagctctactgcctctgctctgggaaagctgcaggacgtcgtgaaccagaacgcccaggctctgaacaccctggtcaagcagctgtcatccaacttcggagccatcagctctgtgctgaacgacatcctcgctaggctggaccctcccgaggctgaagtccagatcgacaggctgatcactggtagactgcagtcactgcagacctacgtgactcagcagctgatccgcgccgctgaaatccgtgcctccgctaacctggccgctaccaagatgagcgagtgcgtcctgggacagtctaagagagtggacttctgcggcaagggataccacctgatgtcattcccacagtccgctcctcacggtgtcgtgttcctgcacgtcacctacgtgcccgcccaggagaagaacttcaccactgccccagctatctgccacgacggcaaggctcacttcccccgcgaaggtgtcttcgtgtcaaacggcacccactggttcgtcactcagcgtaacttctacgagccacagatcatcaccactcacaacactttcgtgtccggaaactgcgacgtggtcatcggtatcgtcaacaacaccgtgtacgaccctctgcagcccgagctggactcattcaaggaagagctggacaagtacttcaagaaccacacctcccctgacgtcgacctgggcgacatctcaggaatcaacgcttccgtcgtgaacatccagaaggagatcgaccgcctgaacgaagtggccaagaacctgaacgaatcactgatcgacctgcaggagctgggcaagtacgaacagtacatcaagtggccttggtacatctggctgggtttcatcgctggcctcatcgctatcgtgatggtgaccatcatgctgtgctgcatgacttcatgctgctcctgcctgaagggctgctgcagctgcggatcttgctgcaagttcgacgaggacgactccgaacccgtcctgaagggagtgaagctgcactacacctaa

SEQ ID NO: 140 - protein, 1270 aa, synthetic construct
  REGION 1..1270: note = modified coronavirus S polypeptide
MFVFLVLLPLVSSQCVNLTTRTQLPPAYTNSFTRGVYYPDKVFRSSVLHSTQDLFLPFFSNVTWFHAIHVSGTNGTKRFANPVLPFNDGVYFASTEKSNIIRGWIFGTTLDSKTQSLLIVNNATNVVIKVCEFQFCNDPFLGVYYHKNNKSWMESEFRVYSSANNCTFEYVSQPFLMDLEGKQGNFKNLREFVFKNIDGYFKIYSKHTPINLVRGLPQGFSALEPLVDLPIGINITRFQTLHALHRSYLTPGDSSSGWTAGAAAYYVGYLQPRTFLLKYNENGTITDAVDCALDPLSETKCTLKSFTVEKGIYQTSNFRVQPTESIVRFPNITNLCPFGEVFNATRFASVYAWNRKRISNCVADYSVLYNSASFSTFKCYGVSPTKLNDLCFTNVYADSFVIRGDEVRQIAPGQTGNIADYNYKLPDDFTGCVIAWNSNNLDSKVGGNYNYLYRLFRKSNLKPFERDISTEIYQAGSTPCNGVKGFNCYFPLQSYGFQPTYGVGYQPYRVVVLSFELLHAPATVCGPKKSTNLVKNKCVNFNFNGLTGTGVLTESNKKFLPFQQFGRDIADTTDAVRDPQTLEILDITPCSFGGVSVITPGTNTSNQVAVLYQGVNCTEVPVAIHADQLTPTWRVYSTGSNVFQTRAGCLIGAEHVNNSYECDIPIGAGICASYQTQTNSPGGSVASQSIIAYTMSLGVENSVAYSNNSIAIPTNFTISVTTEILPVSMTKTSVDCTMYICGDSTECSNLLLQYGSFCTQLNRALTGIAVEQDKNTQEVFAQVKQIYKTPPIKDFGGNFSQILPDPSKPSKRSFIEDLLFNKVTLADAGFIKQYGDCLGDIAARDLICAQKFNGLTVLPPLLTDEMIAQYTSALLAGTITSGWTFGAGAALQIPFAMQMAYRFNGIGVTQNVLYENQKLIANQFNSAIGKIQDSLSSTASALGKLQDVVNQNAQALNTLVKQLSSNFGAISSVLNDILSRLDPPEAEVQIDRLITGRLQSLQTYVTQQLIRAAEIRASANLAATKMSECVLGQSKRVDFCGKGYHLMSFPQSAPHGVVFLHVTYVPAQEKNFTTAPAICHDGKAHFPREGVFVSNGTHWFVTQRNFYEPQIITTDNTFVSGNCDVVIGIVNNTVYDPLQPELDSFKEELDKYFKNHTSPDVDLGDISGINASVVNIQKEIDRLNEVAKNLNESLIDLQELGKYEQYIKWPWYIWLGFIAGLIAIVMVTIMLCCMTSCCSCLKGCCSCGSCCKFDEDDSEPVLKGVKLHYT

SEQ ID NO: 141 - protein, 1257 aa, synthetic construct
  REGION 1..1257: note = modified coronavirus S polypeptide
QCVNLTTRTQLPPAYTNSFTRGVYYPDKVFRSSVLHSTQDLFLPFFSNVTWFHAIHVSGTNGTKRFANPVLPFNDGVYFASTEKSNIIRGWIFGTTLDSKTQSLLIVNNATNVVIKVCEFQFCNDPFLGVYYHKNNKSWMESEFRVYSSANNCTFEYVSQPFLMDLEGKQGNFKNLREFVFKNIDGYFKIYSKHTPINLVRGLPQGFSALEPLVDLPIGINITRFQTLHALHRSYLTPGDSSSGWTAGAAAYYVGYLQPRTFLLKYNENGTITDAVDCALDPLSETKCTLKSFTVEKGIYQTSNFRVQPTESIVRFPNITNLCPFGEVFNATRFASVYAWNRKRISNCVADYSVLYNSASFSTFKCYGVSPTKLNDLCFTNVYADSFVIRGDEVRQIAPGQTGNIADYNYKLPDDFTGCVIAWNSNNLDSKVGGNYNYLYRLFRKSNLKPFERDISTEIYQAGSTPCNGVKGFNCYFPLQSYGFQPTYGVGYQPYRVVVLSFELLHAPATVCGPKKSTNLVKNKCVNFNFNGLTGTGVLTESNKKFLPFQQFGRDIADTTDAVRDPQTLEILDITPCSFGGVSVITPGTNTSNQVAVLYQGVNCTEVPVAIHADQLTPTWRVYSTGSNVFQTRAGCLIGAEHVNNSYECDIPIGAGICASYQTQTNSPGGSVASQSIIAYTMSLGVENSVAYSNNSIAIPTNFTISVTTEILPVSMTKTSVDCTMYICGDSTECSNLLLQYGSFCTQLNRALTGIAVEQDKNTQEVFAQVKQIYKTPPIKDFGGNFSQILPDPSKPSKRSFIEDLLFNKVTLADAGFIKQYGDCLGDIAARDLICAQKFNGLTVLPPLLTDEMIAQYTSALLAGTITSGWTFGAGAALQIPFAMQMAYRFNGIGVTQNVLYENQKLIANQFNSAIGKIQDSLSSTASALGKLQDVVNQNAQALNTLVKQLSSNFGAISSVLNDILSRLDPPEAEVQIDRLITGRLQSLQTYVTQQLIRAAEIRASANLAATKMSECVLGQSKRVDFCGKGYHLMSFPQSAPHGVVFLHVTYVPAQEKNFTTAPAICHDGKAHFPREGVFVSNGTHWFVTQRNFYEPQIITTDNTFVSGNCDVVIGIVNNTVYDPLQPELDSFKEELDKYFKNHTSPDVDLGDISGINASVVNIQKEIDRLNEVAKNLNESLIDLQELGKYEQYIKWPWYIWLGFIAGLIAIVMVTIMLCCMTSCCSCLKGCCSCGSCCKFDEDDSEPVLKGVKLHYT

SEQ ID NO: 142 - DNA, 3816 bp, synthetic construct
  misc_feature 1..3816: note = modified coronavirus S polypeptide
  source 1..3816: mol_type = other DNA
atgttcgtcttcctggtgctgctgcctctggtgtccagccagtgcgtgaacctgaccactaggactcagctgcctcccgcttacaccaactcattcactaggggtgtgtactacccagacaaggtcttccgctcctcagtgctgcactcaactcaggacctgttcctgcctttcttctccaacgtcacctggttccacgctatccacgtgtccggcaccaacggcactaagaggttcgccaaccccgtgctgccattcaacgacggagtctacttcgcttcaaccgagaagtccaacatcatcagaggatggatcttcggcaccactctggacagcaagactcagtctctgctgatcgtcaacaacgctaccaacgtggtcatcaaggtgtgcgaattccagttctgtaacgaccccttcctgggtgtctactaccacaagaacaacaagtcatggatggagtccgaattccgcgtctactccagcgctaacaactgcactttcgagtacgtgtcccagccattcctgatggacctggaaggaaagcagggtaacttcaagaacctgcgcgagttcgtgttcaagaacatcgacggctacttcaagatttacagcaagcacacccccatcaacctggtccgtggcctgccacagggattctctgctctggagcccctggtggacctgccaatcggcatcaacatcaccaggttccagactctgcacgccctgcacagatcctacctgactcccggagactcttcatccggttggaccgctggcgctgccgcttactacgtgggttacctgcagccacgcaccttcctgctgaagtacaacgaaaacggcaccatcactgacgccgtcgactgcgctctggacccactgtcagaaaccaagtgcactctgaagtccttcaccgtggagaagggaatctaccagacttcaaacttccgcgtgcagcctaccgaatccatcgtccgtttcccaaacatcactaacctgtgccctttcggagaggtcttcaacgccacccgcttcgcttccgtgtacgcctggaaccgcaagcgtatctcaaactgcgtcgctgactactccgtgctgtacaactcagcctccttcagcaccttcaagtgctacggagtgtcacccactaagctgaacgacctgtgcttcaccaacgtctacgctgactccttcgtgatccgcggtgacgaggtccgtcagatcgctccaggccagactggaaacatcgccgactacaactacaagctgcctgacgacttcaccggttgcgtcatcgcctggaacagcaacaacctggactctaaagtgggtggcaactacaactacctgtacaggctgttcagaaagtcaaacctgaagcccttcgagcgcgacatcagcactgaaatctaccaggctggttctaccccatgcaacggtgtcaagggcttcaactgctacttccctctgcagtcctacggcttccagcccacttacggtgtgggctaccagccataccgtgtggtcgtgctgagcttcgagctgctgcacgcccctgctactgtgtgcggacccaagaagtctaccaacctggtcaagaacaagtgcgtgaacttcaacttcaacggtctgaccggaactggtgtcctgaccgagagcaacaagaagttcctgcctttccagcagttcggtcgcgacatcgctgacaccactgacgccgtgcgtgaccctcagaccctggaaatcctggacatcactccctgctcattcggaggtgtctccgtgatcactcccggaaccaacacttctaaccaggtcgctgtgctgtaccagggtgtgaactgcaccgaagtcccagtggccatccacgctgaccagctgacccctacttggagggtgtactccaccggcagcaacgtcttccagactagagctggatgcctgatcggtgccgagcacgtcaacaacagctacgaatgcgacatccctatcggcgctggaatctgcgcctcttaccagacccagactaacagcccaggtggttctgtggcctctcagtcaatcatcgcctacaccatgtcactgggtgtcgaaaactccgtggcttactctaacaactcaatcgccatccctaccaacttcactatcagcgtgaccactgagatcctgcccgtcagcatgaccaagacttctgtggactgcactatgtacatctgcggcgacagcaccgaatgctctaacctgctgctgcagtacggttctttctgcacccagctgaaccgcgctctgactggcatcgccgtggagcaggacaagaacactcaggaagtcttcgctcaggtgaagcaaatctacaagaccccacctatcaaggacttcggcggattcaacttctcccagatcctgccagacccttccaagcccagcaagaggtctttcatcgaggacctgctgttcaacaaggtcactctggccgacgctggtttcatcaagcagtacggcgactgcctgggagacatcgctgctcgcgacctgatctgcgcccagaagttcaacggcctgaccgtgctgcccccactgctgactgacgaaatgatcgctcagtacactagcgccctgctggctggcaccatcacttcaggttggactttcggtgctggtgctgctctgcagatcccattcgctatgcagatggcctaccgtttcaacggaatcggtgtcacccagaacgtgctgtacgagaaccagaagctgatcgctaaccagttcaactcagccatcggcaagatccaggacagcctgagctctactgcctctgctctgggaaagctgcaggacgtcgtgaaccagaacgcccaggctctgaacaccctggtcaagcagctgtcatccaacttcggcgccatcagctctgtgctgaacgacatcctgtccaggctggaccctcccgaggctgaagtccagatcgacaggctgatcactggaagactgcagtcactgcagacctacgtgactcagcagctgatccgcgccgctgaaatccgtgcctccgctaacctggccgctaccaagatgagcgagtgcgtcctgggccagtctaagagagtggacttctgcggcaagggataccacctgatgtcattcccacagtccgcccctcacggagtcgtgttcctgcacgtcacctacgtgcccgctcaggagaagaacttcaccactgccccagctatctgccacgacggcaaggctcacttccctcgcgaaggagtcttcgtgagcaacggcacccactggttcgtcactcagcgtaacttctacgagccccagatcatcaccactgacaacactttcgtgtctggcaactgcgacgtggtcatcggtatcgtcaacaacaccgtgtacgaccctctgcagcccgagctggactcattcaaggaagagctggacaagtacttcaagaaccacacctcccctgacgtcgacctgggtgacatctcaggcatcaacgcctccgtcgtgaacatccagaaggagatcgaccgcctgaacgaagtggctaagaacctgaacgaaagcctgatcgacctgcaggagctgggcaagtacgaacagtacatcaagtggccatggtacatctggctgggattcatcgctggcctcatcgctatcgtgatggtgaccatcatgctgtgctgcatgacttcatgctgctcctgcctgaagggttgctgcagctgcggctcttgctgcaagttcgacgaggacgactctgaacctgtcctgaagggagtgaagctgcactacacctaa

SEQ ID NO: 143 - protein, 1269 aa, synthetic construct
  REGION 1..1269: note = modified coronavirus S polypeptide
MFVFLVLLPLVSSQCVNFTTRTQLPPAYTNSFTRGVYYPDKVFRSSVLHSTQDLFLPFFSNVTWFHAIHVSGTNGTKRFANPVLPFNDGVYFASTEKSNIIRGWIFGTTLDSKTQSLLIVNNATNVVIKVCEFQFCNDPFLGVYYHKNNKSWMESEFRVYSSANNCTFEYVSQPFLMDLEGKQGNFKNLREFVFKNIDGYFKIYSKHTPINLVRGLPQGFSALEPLVDLPIGINITRFQTLHRSYLTPGDSSSGWTAGAAAYYVGYLQPRTFLLKYNENGTITDAVDCALDPLSETKCTLKSFTVEKGIYQTSNFRVQPTESIVRFPNITNLCPFGEVFNATRFASVYAWNRKRISNCVADYSVLYNSASFSTFKCYGVSPTKLNDLCFTNVYADSFVIRGDEVRQIAPGQTGNIADYNYKLPDDFTGCVIAWNSNNLDSKVGGNYNYLYRLFRKSNLKPFERDISTEIYQAGSTPCNGVKGFNCYFPLQSYGFQPTYGVGYQPYRVVVLSFELLHAPATVCGPKKSTNLVKNKCVNFNFNGLTGTGVLTESNKKFLPFQQFGRDIADTTDAVRDPQTLEILDITPCSFGGVSVITPGTNTSNQVAVLYQGVNCTEVPVAIHADQLTPTWRVYSTGSNVFQTRAGCLIGAEHVNNSYECDIPIGAGICASYQTQTNSPQQAQSVASQSIIAYTMSLGVENSVAYSNNSIAIPTNFTISVTTEILPVSMTKTSVDCTMYICGDSTECSNLLLQYGSFCTQLNRALTGIAVEQDKNTQEVFAQVKQIYKTPPIKDFGGNFSQILPDPSKPSKRSFIEDLLFNKVTLADAGFIKQYGDCLGDIAARDLICAQKFNGLTVLPPLLTDEMIAQYTSALLAGTITSGWTFGAGAALQIPFAMQMAYRFNGIGVTQNVLYENQKLIANQFNSAIGKIQDSLSSTASALGKLQDVVNQNAQALNTLVKQLSSNFGAISSVLNDILSRLDPPEAEVQIDRLITGRLQSLQTYVTQQLIRAAEIRASANLAATKMSECVLGQSKRVDFCGKGYHLMSFPQSAPHGVVFLHVTYVPAQEKNFTTAPAICHDGKAHFPREGVFVSNGTHWFVTQRNFYEPQIITTDNTFVSGNCDVVIGIVNNTVYDPLQPELDSFKEELDKYFKNHTSPDVDLGDISGINASVVNIQKEIDRLNEVAKNLNESLIDLQELGKYEQYIKWPWYIWLGFIAGLIAIVMVTIMLCCMTSCCSCLKGCCSCGSCCKFDEDDSEPVLKGVKLHYT

SEQ ID NO: 144 - protein, 1256 aa, synthetic construct
  REGION 1..1256: note = modified coronavirus S polypeptide
QCVNFTTRTQLPPAYTNSFTRGVYYPDKVFRSSVLHSTQDLFLPFFSNVTWFHAIHVSGTNGTKRFANPVLPFNDGVYFASTEKSNIIRGWIFGTTLDSKTQSLLIVNNATNVVIKVCEFQFCNDPFLGVYYHKNNKSWMESEFRVYSSANNCTFEYVSQPFLMDLEGKQGNFKNLREFVFKNIDGYFKIYSKHTPINLVRGLPQGFSALEPLVDLPIGINITRFQTLHRSYLTPGDSSSGWTAGAAAYYVGYLQPRTFLLKYNENGTITDAVDCALDPLSETKCTLKSFTVEKGIYQTSNFRVQPTESIVRFPNITNLCPFGEVFNATRFASVYAWNRKRISNCVADYSVLYNSASFSTFKCYGVSPTKLNDLCFTNVYADSFVIRGDEVRQIAPGQTGNIADYNYKLPDDFTGCVIAWNSNNLDSKVGGNYNYLYRLFRKSNLKPFERDISTEIYQAGSTPCNGVKGFNCYFPLQSYGFQPTYGVGYQPYRVVVLSFELLHAPATVCGPKKSTNLVKNKCVNFNFNGLTGTGVLTESNKKFLPFQQFGRDIADTTDAVRDPQTLEILDITPCSFGGVSVITPGTNTSNQVAVLYQGVNCTEVPVAIHADQLTPTWRVYSTGSNVFQTRAGCLIGAEHVNNSYECDIPIGAGICASYQTQTNSPQQAQSVASQSIIAYTMSLGVENSVAYSNNSIAIPTNFTISVTTEILPVSMTKTSVDCTMYICGDSTECSNLLLQYGSFCTQLNRALTGIAVEQDKNTQEVFAQVKQIYKTPPIKDFGGNFSQILPDPSKPSKRSFIEDLLFNKVTLADAGFIKQYGDCLGDIAARDLICAQKFNGLTVLPPLLTDEMIAQYTSALLAGTITSGWTFGAGAALQIPFAMQMAYRFNGIGVTQNVLYENQKLIANQFNSAIGKIQDSLSSTASALGKLQDVVNQNAQALNTLVKQLSSNFGAISSVLNDILSRLDPPEAEVQIDRLITGRLQSLQTYVTQQLIRAAEIRASANLAATKMSECVLGQSKRVDFCGKGYHLMSFPQSAPHGVVFLHVTYVPAQEKNFTTAPAICHDGKAHFPREGVFVSNGTHWFVTQRNFYEPQIITTDNTFVSGNCDVVIGIVNNTVYDPLQPELDSFKEELDKYFKNHTSPDVDLGDISGINASVVNIQKEIDRLNEVAKNLNESLIDLQELGKYEQYIKWPWYIWLGFIAGLIAIVMVTIMLCCMTSCCSCLKGCCSCGSCCKFDEDDSEPVLKGVKLHYT

SEQ ID NO: 145 - DNA, 3812 bp, synthetic construct
  misc_feature 1..3812: note = modified coronavirus S polypeptide
  source 1..3812: mol_type = other DNA
atgttcgtcttcctggtgctgctgcctctggtgtccagccagtgcgtgaacttcaccactaggactcagctgcctcccgcttacaccaactcattcactaggggtgtgtactacccagacaaggtcttccgctcctcagtgctgcactcaactcaggacctgttcctgcctttcttctccaacgtcacctggttccacgctatccacgtgtccggcaccaacggcactaagaggttcgccaaccccgtgctgccattcaacgacggagtctacttcgcttcaaccgagaagtccaacatcatcagaggatggatcttcggcaccactctggacagcaagactcagtctctgctgatcgtcaacaacgctaccaacgtggtcatcaaggtgtgcgaattccagttctgtaacgaccccttcctgggtgtctactaccacaagaacaacaagtcatggatggagtccgaattccgcgtctactccagcgctaacaactgcactttcgagtacgtgtcccagccattcctgatggacctggaaggaaagcagggtaacttcaagaacctgcgcgagttcgtgttcaagaacatcgacggctacttcaagatttacagcaagcacacccccatcaacctggtccgtggcctgccacagggattctctgctctggagcccctggtggacctgccaatcggcatcaacatcaccaggttccagactctgcacagatcctacctgactcccggagactcttcatccggttggaccgctggcgctgccgcttactacgtgggttacctgcagccacgcaccttcctgctgaagtacaacgaaaacggcaccatcactgacgccgtcgactgcgctctggacccactgtcagaaaccaagtgcactctgaagtccttcaccgtggagaagggaatctaccagacttcaaacttccgcgtgcagcctaccgaatccatcgtccgtttcccaaacatcactaacctgtgccctttcggagaggtcttcaacgccacccgcttcgcttccgtgtacgcctggaaccgcaagcgtatctcaaactgcgtcgctgactactccgtgctgtacaactcagcctccttcagcaccttcaagtgctacggagtgtcacccactaagctgaacgacctgtgcttcaccaacgtctacgctgactccttcgtgatccgcggtgacgaggtccgtcagatcgctccaggccagactggaaacatcgccgactacaactacaagctgcctgacgacttcaccggttgcgtcatcgcctggaacagcaacaacctggactctaaagtgggtggcaactacaactacctgtacaggctgttcagaaagtcaaacctgaagcccttcgagcgcgacatcagcactgaaatctaccaggctggttctaccccatgcaacggtgtcaagggcttcaactgctacttccctctgcagtcctacggcttccagcccacttacggtgtgggctaccagccataccgtgtggtcgtgctgagcttcgagctgctgcacgcccctgctactgtgtgcggacccaagaagtctaccaacctggtcaagaacaagtgcgtgaacttcaacttcaacggtctgaccggaactggtgtcctgaccgagagcaacaagaagttcctgcctttccagcagttcggtcgcgacatcgctgacaccactgacgccgtgcgtgaccctcagaccctggaaatcctggacatcactccctgctcattcggaggtgtctccgtgatcactcccggaaccaacacttctaaccaggtcgctgtgctgtaccagggtgtgaactgcaccgaagtcccagtggccatccacgctgaccagctgacccctacttggagggtgtactccaccggcagcaacgtcttccagactagagctggatgcctgatcggtgccgagcacgtcaacaacagctacgaatgcgacatccctatcggcgctggaatctgcgcctcttaccagacccagactaacagcccccagcaggctcagtctgtggcctctcagtcaatcatcgcctacaccatgtcactgggtgtcgaaaactccgtggcttactctaacaactcaatcgccatccctaccaacttcactatcagcgtgaccactgagatcctgcccgtcagcatgaccaagacttctgtggactgcactatgtacatctgcggcgacagcaccgaatgctctaacctgctgctgcagtacggttctttctgcacccagctgaaccgcgctctgactggcatcgccgtggagcaggacaagaacactcaggaagtcttcgctcaggtgaagcaaatctacaagaccccacctatcaaggacttcggcggattcaacttctcccagatcctgccagacccttccaagcccagcaagaggtctttcatcgaggacctgctgttcaacaaggtcactctggccgacgctggtttcatcaagcagtacggcgactgcctgggagacatcgctgctcgcgacctgatctgcgcccagaagttcaacggcctgaccgtgctgcccccactgctgactgacgaaatgatcgctcagtacactagcgccctgctggctggcaccatcacttcaggttggactttcggtgctggtgctgctctgcagatcccattcgctatgcagatggcctaccgtttcaacggaatcggtgtcacccagaacgtgctgtacgagaaccagaagctgatcgctaaccagttcaactcagccatcggcaagatccaggacagcctgagctctactgcctctgctctgggaaagctgcaggacgtcgtgaaccagaacgcccaggctctgaacaccctggtcaagcagctgtcatccaacttcggcgccatcagctctgtgctgaacgacatcctgtccaggctggaccctcccgaggctgaagtccagatcgacaggctgatcactggaagactgcagtcactgcagacctacgtgactcagcagctgatccgcgccgctgaaatccgtgcctccgctaacctggccgctaccaagatgagcgagtgcgtcctgggccagtctaagagagtggacttctgcggcaagggataccacctgatgtcattcccacagtccgcccctcacggagtcgtgttcctgcacgtcacctacgtgcccgctcaggagaagaacttcaccactgccccagctatctgccacgacggcaaggctcacttccctcgcgaaggagtcttcgtgagcaacggcacccactggttcgtcactcagcgtaacttctacgagccccagatcatcaccactgacaacactttcgtgtctggcaactgcgacgtggtcatcggtatcgtcaacaacaccgtgtacgaccctctgcagcccgagctggactcattcaaggaagagctggacaagtacttcaagaaccacacctcccctgacgtcgacctgggtgacatctcaggcatcaacgcctccgtcgtgaacatccagaaggagatcgaccgcctgaacgaagtggctaagaacctgaacgaaagcctgatcgacctgcaggagctgggcaagtacgaacagtacatcaagtggccatggtacatctggctgggattcatcgctggcctcatcgctatcgtgatggtgaccatcatgctgtgctgcatgacttcatgctgctcctgcctgaagggttgctgcagctgcggctcttgctgcaagttcgacgaggacgactctgaaccttcctgaagggagtgaagctgcactacacctaa

SEQ ID NO: 146 - protein, 1267 aa, synthetic construct
  REGION 1..1267: note = modified coronavirus S polypeptide
MFVFLVLLPLVSSQCVNFTTRTQLPPAYTNSFTRGVYYPDKVFRSSVLHSTQDLFLPFFSNVTWFHAIHVSGTNGTKRFANPVLPFNDGVYFASTEKSNIIRGWIFGTTLDSKTQSLLIVNNATNVVIKVCEFQFCNDPFLGVYYHKNNKSWMESEFRVYSSANNCTFEYVSQPFLMDLEGKQGNFKNLREFVFKNIDGYFKIYSKHTPINLVRGLPQGFSALEPLVDLPIGINITRFQTLHRSYLTPGDSSSGWTAGAAAYYVGYLQPRTFLLKYNENGTITDAVDCALDPLSETKCTLKSFTVEKGIYQTSNFRVQPTESIVRFPNITNLCPFGEVFNATRFASVYAWNRKRISNCVADYSVLYNSASFSTFKCYGVSPTKLNDLCFTNVYADSFVIRGDEVRQIAPGQTGNIADYNYKLPDDFTGCVIAWNSNNLDSKVGGNYNYLYRLFRKSNLKPFERDISTEIYQAGSTPCNGVKGFNCYFPLQSYGFQPTYGVGYQPYRVVVLSFELLHAPATVCGPKKSTNLVKNKCVNFNFNGLTGTGVLTESNKKFLPFQQFGRDIADTTDAVRDPQTLEILDITPCSFGGVSVITPGTNTSNQVAVLYQGVNCTEVPVAIHADQLTPTWRVYSTGSNVFQTRAGCLIGAEHVNNSYECDIPIGAGICASYQTQTNSPGGSVASQSIIAYTMSLGVENSVAYSNNSIAIPTNFTISVTTEILPVSMTKTSVDCTMYICGDSTECSNLLLQYGSFCTQLNRALTGIAVEQDKNTQEVFAQVKQIYKTPPIKDFGGNFSQILPDPSKPSKRSFIEDLLFNKVTLADAGFIKQYGDCLGDIAARDLICAQKFNGLTVLPPLLTDEMIAQYTSALLAGTITSGWTFGAGAALQIPFAMQMAYRFNGIGVTQNVLYENQKLIANQFNSAIGKIQDSLSSTASALGKLQDVVNQNAQALNTLVKQLSSNFGAISSVLNDILSRLDPPEAEVQIDRLITGRLQSLQTYVTQQLIRAAEIRASANLAATKMSECVLGQSKRVDFCGKGYHLMSFPQSAPHGVVFLHVTYVPAQEKNFTTAPAICHDGKAHFPREGVFVSNGTHWFVTQRNFYEPQIITTDNTFVSGNCDVVIGIVNNTVYDPLQPELDSFKEELDKYFKNHTSPDVDLGDISGINASVVNIQKEIDRLNEVAKNLNESLIDLQELGKYEQYIKWPWYIWLGFIAGLIAIVMVTIMLCCMTSCCSCLKGCCSCGSCCKFDEDDSEPVLKGVKLHYT

SEQ ID NO: 147 - protein, 1254 aa, synthetic construct
  REGION 1..1254: note = modified coronavirus S polypeptide
QCVNFTTRTQLPPAYTNSFTRGVYYPDKVFRSSVLHSTQDLFLPFFSNVTWFHAIHVSGTNGTKRFANPVLPFNDGVYFASTEKSNIIRGWIFGTTLDSKTQSLLIVNNATNVVIKVCEFQFCNDPFLGVYYHKNNKSWMESEFRVYSSANNCTFEYVSQPFLMDLEGKQGNFKNLREFVFKNIDGYFKIYSKHTPINLVRGLPQGFSALEPLVDLPIGINITRFQTLHRSYLTPGDSSSGWTAGAAAYYVGYLQPRTFLLKYNENGTITDAVDCALDPLSETKCTLKSFTVEKGIYQTSNFRVQPTESIVRFPNITNLCPFGEVFNATRFASVYAWNRKRISNCVADYSVLYNSASFSTFKCYGVSPTKLNDLCFTNVYADSFVIRGDEVRQIAPGQTGNIADYNYKLPDDFTGCVIAWNSNNLDSKVGGNYNYLYRLFRKSNLKPFERDISTEIYQAGSTPCNGVKGFNCYFPLQSYGFQPTYGVGYQPYRVVVLSFELLHAPATVCGPKKSTNLVKNKCVNFNFNGLTGTGVLTESNKKFLPFQQFGRDIADTTDAVRDPQTLEILDITPCSFGGVSVITPGTNTSNQVAVLYQGVNCTEVPVAIHADQLTPTWRVYSTGSNVFQTRAGCLIGAEHVNNSYECDIPIGAGICASYQTQTNSPGGSVASQSIIAYTMSLGVENSVAYSNNSIAIPTNFTISVTTEILPVSMTKTSVDCTMYICGDSTECSNLLLQYGSFCTQLNRALTGIAVEQDKNTQEVFAQVKQIYKTPPIKDFGGNFSQILPDPSKPSKRSFIEDLLFNKVTLADAGFIKQYGDCLGDIAARDLICAQKFNGLTVLPPLLTDEMIAQYTSALLAGTITSGWTFGAGAALQIPFAMQMAYRFNGIGVTQNVLYENQKLIANQFNSAIGKIQDSLSSTASALGKLQDVVNQNAQALNTLVKQLSSNFGAISSVLNDILSRLDPPEAEVQIDRLITGRLQSLQTYVTQQLIRAAEIRASANLAATKMSECVLGQSKRVDFCGKGYHLMSFPQSAPHGVVFLHVTYVPAQEKNFTTAPAICHDGKAHFPREGVFVSNGTHWFVTQRNFYEPQIITTDNTFVSGNCDVVIGIVNNTVYDPLQPELDSFKEELDKYFKNHTSPDVDLGDISGINASVVNIQKEIDRLNEVAKNLNESLIDLQELGKYEQYIKWPWYIWLGFIAGLIAIVMVTIMLCCMTSCCSCLKGCCSCGSCCKFDEDDSEPVLKGVKLHYT

SEQ ID NO: 148 - DNA, 3804 bp, synthetic construct
  misc_feature 1..3804: note = modified coronavirus S polypeptide
  source 1..3804: mol_type = other DNA
atgttcgtcttcctggtgctgctgcctctggtgtccagccagtgcgtgaacttcaccactaggactcagctgcctcccgcttacaccaactcattcactaggggtgtgtactacccagacaaggtcttccgctcctcagtgctgcactcaactcaggacctgttcctgcctttcttctccaacgtcacctggttccacgctatccacgtgtccggcaccaacggcactaagaggttcgccaaccccgtgctgccattcaacgacggagtctacttcgcttcaaccgagaagtccaacatcatcagaggatggatcttcggcaccactctggacagcaagactcagtctctgctgatcgtcaacaacgctaccaacgtggtcatcaaggtgtgcgaattccagttctgtaacgaccccttcctgggtgtctactaccacaagaacaacaagtcatggatggagtccgaattccgcgtctactccagcgctaacaactgcactttcgagtacgtgtcccagccattcctgatggacctggaaggaaagcagggtaacttcaagaacctgcgcgagttcgtgttcaagaacatcgacggctacttcaagatttacagcaagcacacccccatcaacctggtccgtggcctgccacagggattctctgctctggagcccctggtggacctgccaatcggcatcaacatcaccaggttccagactctgcacagatcctacctgactcccggagactcttcatccggttggaccgctggcgctgccgcttactacgtgggttacctgcagccacgcaccttcctgctgaagtacaacgaaaacggcaccatcactgacgccgtcgactgcgctctggacccactgtcagaaaccaagtgcactctgaagtccttcaccgtggagaagggaatctaccagacttcaaacttccgcgtgcagcctaccgaatccatcgtccgtttcccaaacatcactaacctgtgccctttcggagaggtcttcaacgccacccgcttcgcttccgtgtacgcctggaaccgcaagcgtatctcaaactgcgtcgctgactactccgtgctgtacaactcagcctccttcagcaccttcaagtgctacggagtgtcacccactaagctgaacgacctgtgcttcaccaacgtctacgctgactccttcgtgatccgcggtgacgaggtccgtcagatcgctccaggccagactggaaacatcgccgactacaactacaagctgcctgacgacttcaccggttgcgtcatcgcctggaacagcaacaacctggactctaaagtgggtggcaactacaactacctgtacaggctgttcagaaagtcaaacctgaagcccttcgagcgcgacatcagcactgaaatctaccaggctggttctaccccatgcaacggtgtcaagggcttcaactgctacttccctctgcagtcctacggcttccagcccacttacggtgtgggctaccagccataccgtgtggtcgtgctgagcttcgagctgctgcacgcccctgctactgtgtgcggacccaagaagtctaccaacctggtcaagaacaagtgcgtgaacttcaacttcaacggtctgaccggaactggtgtcctgaccgagagcaacaagaagttcctgcctttccagcagttcggtcgcgacatcgctgacaccactgacgccgtgcgtgaccctcagaccctggaaatcctggacatcactccctgctcattcggaggtgtctccgtgatcactcccggaaccaacacttctaaccaggtcgctgtgctgtaccagggtgtgaactgcaccgaagtcccagtggccatccacgctgaccagctgacccctacttggagggtgtactccaccggcagcaacgtcttccagactagagctggatgcctgatcggtgccgagcacgtcaacaacagctacgaatgcgacatccctatcggcgctggaatctgcgcctcttaccagacccagactaacagcccaggtggttctgtggcctctcagtcaatcatcgcctacaccatgtcactgggtgtcgaaaactccgtggcttactctaacaactcaatcgccatccctaccaacttcactatcagcgtgaccactgagatcctgcccgtcagcatgaccaagacttctgtggactgcactatgtacatctgcggcgacagcaccgaatgctctaacctgctgctgcagtacggttctttctgcacccagctgaaccgcgctctgactggcatcgccgtggagcaggacaagaacactcaggaagtcttcgctcaggtgaagcaaatctacaagaccccacctatcaaggacttcggcggattcaacttctcccagatcctgccagacccttccaagcccagcaagaggtctttcatcgaggacctgctgttcaacaaggtcactctggccgacgctggtttcatcaagcagtacggcgactgcctgggagacatcgctgctcgcgacctgatctgcgcccagaagttcaacggcctgaccgtgctgcccccactgctgactgacgaaatgatcgctcagtacactagcgccctgctggctggcaccatcacttcaggttggactttcggtgctggtgctgctctgcagatcccattcgctatgcagatggcctaccgtttcaacggaatcggtgtcacccagaacgtgctgtacgagaaccagaagctgatcgctaaccagttcaactcagccatcggcaagatccaggacagcctgagctctactgcctctgctctgggaaagctgcaggacgtcgtgaaccagaacgcccaggctctgaacaccctggtcaagcagctgtcatccaacttcggcgccatcagctctgtgctgaacgacatcctgtccaggctggaccctcccgaggctgaagtccagatcgacaggctgatcactggaagactgcagtcactgcagacctacgtgactcagcagctgatccgcgccgctgaaatccgtgcctccgctaacctggccgctaccaagatgagcgagtgcgtcctgggccagtctaagagagtggacttctgcggcaagggataccacctgatgtcattcccacagtccgcccctcacggagtcgtgttcctgcacgtcacctacgtgcccgctcaggagaagaacttcaccactgccccagctatctgccacgacggcaaggctcacttccctcgcgaaggagtcttcgtgagcaacggcacccactggttcgtcactcagcgtaacttctacgagccccagatcatcaccactgacaacactttcgtgtctggcaactgcgacgtggtcatcggtatcgtcaacaacaccgtgtacgaccctctgcagcccgagctggactcattcaaggaagagctggacaagtacttcaagaaccacacctcccctgacgtcgacctgggtgacatctcaggcatcaacgcctccgtcgtgaacatccagaaggagatcgaccgcctgaacgaagtggctaagaacctgaacgaaagcctgatcgacctgcaggagctgggcaagtacgaacagtacatcaagtggccatggtacatctggctgggattcatcgctggcctcatcgctatcgtgatggtgaccatcatgctgtgctgcatgacttcatgctgctcctgcctgaagggttgctgcagctgcggctcttgctgcaagttcgacgaggacgactctgaacctgtcctgaagggagtgaagctgcactacacc

SEQ ID NO: 149 - protein, 1273 aa, synthetic construct
  REGION 1..1273: note = modified coronavirus S polypeptide
MFVFLVLLPLVSSQCVNFTNRTQLPSAYTNSFTRGVYYPDKVFRSSVLHSTQDLFLPFFSNVTWFHAIHVSGTNGTKRFDNPVLPFNDGVYFASTEKSNIIRGWIFGTTLDSKTQSLLIVNNATNVVIKVCEFQFCNYPFLGVYYHKNNKSWMESEFRVYSSANNCTFEYVSQPFLMDLEGKQGNFKNLSEFVFKNIDGYFKIYSKHTPINLVRDLPQGFSALEPLVDLPIGINITRFQTLLALHRSYLTPGDSSSGWTAGAAAYYVGYLQPRTFLLKYNENGTITDAVDCALDPLSETKCTLKSFTVEKGIYQTSNFRVQPTESIVRFPNITNLCPFGEVFNATRFASVYAWNRKRISNCVADYSVLYNSASFSTFKCYGVSPTKLNDLCFTNVYADSFVIRGDEVRQIAPGQTGTIADYNYKLPDDFTGCVIAWNSNNLDSKVGGNYNYLYRLFRKSNLKPFERDISTEIYQAGSTPCNGVKGFNCYFPLQSYGFQPTYGVGYQPYRVVVLSFELLHAPATVCGPKKSTNLVKNKCVNFNFNGLTGTGVLTESNKKFLPFQQFGRDIADTTDAVRDPQTLEILDITPCSFGGVSVITPGTNTSNQVAVLYQGVNCTEVPVAIHADQLTPTWRVYSTGSNVFQTRAGCLIGAEYVNNSYECDIPIGAGICASYQTQTNSPQQAQSVASQSIIAYTMSLGAENSVAYSNNSIAIPTNFTISVTTEILPVSMTKTSVDCTMYICGDSTECSNLLLQYGSFCTQLNRALTGIAVEQDKNTQEVFAQVKQIYKTPPIKDFGGFNFSQILPDPSKPSKRSFIEDLLFNKVTLADAGFIKQYGDCLGDIAARDLICAQKFNGLTVLPPLLTDEMIAQYTSALLAGTITSGWTFGAGAALQIPFAMQMAYRFNGIGVTQNVLYENQKLIANQFNSAIGKIQDSLSSTASALGKLQDVVNQNAQALNTLVKQLSSNFGAISSVLNDILSRLDPPEAEVQIDRLITGRLQSLQTYVTQQLIRAAEIRASANLAAIKMSECVLGQSKRVDFCGKGYHLMSFPQSAPHGVVFLHVTYVPAQEKNFTTAPAICHDGKAHFPREGVFVSNGTHWFVTQRNFYEPQIITTDNTFVSGNCDVVIGIVNNTVYDPLQPELDSFKEELDKYFKNHTSPDVDLGDISGINASFVNIQKEIDRLNEVAKNLNESLIDLQELGKYEQYIKWPWYIWLGFIAGLIAIVMVTIMLCCMTSCCSCLKGCCSCGSCCKFDEDDSEPVLKGVKLHYT

SEQ ID NO: 150 - DNA, 3822 bp, synthetic construct
  misc_feature 1..3822: note = modified coronavirus S polypeptide
  source 1..3822: mol_type = other DNA
atgttcgtcttcctggtgctgctgcctctggtgtccagccagtgcgtgaacttcaccaaccgcactcagctgcctagcgcttacaccaactctttcactaggggtgtgtactaccccgacaaggtcttccgctcctcagtgctgcactctactcaggacctgttcctgcccttcttctctaacgtcacctggttccacgccatccacgtgagcggcaccaacggcactaagaggttcgacaacccagtgctgcctttcaacgacggtgtctacttcgcttcaaccgagaagtccaacatcatcagaggatggatcttcggcaccactctggacagcaagactcagtctctgctgatcgtcaacaacgccaccaacgtggtcatcaaggtgtgcgaattccagttctgcaactacccattcctgggcgtctactaccacaagaacaacaagtcatggatggagtccgaattccgcgtctactccagcgctaacaactgcactttcgagtacgtgtcccagcctttcctgatggacctggaaggaaagcagggtaacttcaagaacctgtcagagttcgtgttcaagaacatcgacggatacttcaagatttactccaagcacaccccaatcaacctggtccgtgacctgcctcagggtttctcagctctggagccactggtggacctgcctatcggcatcaacatcaccaggttccagactctgctggctctgcacagatcctacctgactccaggtgactcatcttctggatggactgctggagctgctgcttactacgtgggttacctgcagcctcgcaccttcctgctgaagtacaacgaaaacggcaccatcactgacgccgtcgactgcgctctggaccctctgagcgaaaccaagtgcactctgaagtctttcaccgtggagaagggtatctaccagactagcaacttccgcgtgcagcccaccgaatctatcgtccgtttccctaacatcactaacctgtgccccttcggcgaggtcttcaacgccacccgtttcgcttccgtgtacgcctggaaccgcaagcgtatcagcaactgcgtcgctgactactctgtgctgtacaactcagcctccttcagcactttcaagtgctacggtgtgagccctactaagctgaacgacctgtgcttcaccaacgtctacgccgactctttcgtgatccgcggcgacgaggtccgtcagatcgctccaggccagaccggaactatcgccgactacaactacaagctgcctgacgacttcaccggctgcgtcatcgcttggaactcaaacaacctggactccaaagtgggtggcaactacaactacctgtacaggctgttcagaaagtcaaacctgaagcccttcgagagggacatctcaactgaaatctaccaggccggctccaccccatgcaacggtgtcaagggcttcaactgctacttccccctgcagtcctacggattccagccaacttacggtgtgggctaccagccttacagagtggtcgtgctgtcattcgaactcctccacgctcctgctactgtgtgcggaccaaagaagtccaccaacctggtcaagaacaagtgcgtgaacttcaacttcaacggtctgaccggaactggtgtcctgaccgagtcaaacaagaagttcctgcccttccagcagttcggtcgcgacatcgctgacactaccgacgccgtgcgtgacccccagaccctggaaatcctggacatcactccatgcagcttcggaggtgtctctgtgatcactccaggaaccaacacttccaaccaggtcgctgtgctgtaccagggtgtcaactgcaccgaagtccctgtggccatccacgctgaccagctgacccccacttggagggtgtactccaccggcagcaacgtcttccagactagagctggttgcctgatcggcgccgagtacgtgaacaactcatacgaatgcgacatccctatcggcgctggaatctgcgcctcctaccagacccagactaactcaccccagcaggctcagtccgtcgcctctcagtcaatcatcgcttacaccatgagcctgggcgctgaaaactctgtggcctactctaacaactcaatcgccatccccaccaacttcactatcagcgtgaccactgagatcctgccagtctcaatgaccaagacttccgtggactgcactatgtacatctgcggagacagcaccgaatgctctaacctgctgctgcagtacggctctttctgcacccagctgaacagggctctgactggaatcgccgtggagcaggacaagaacactcaggaagtcttcgctcaggtgaagcaaatctacaagacccctcccatcaaggacttcggcggattcaacttctcccagatcctgcctgacccctccaagcccagcaagcgctctttcatcgaggacctgctgttcaacaaggtcaccctggccgacgctggcttcatcaagcagtacggagactgcctgggtgacatcgccgctcgtgacctgatctgcgctcagaagttcaacggactgaccgtgctgccacctctgctgactgacgaaatgatcgcccagtacacttcagccctgctggctggaaccatcacttctggttggaccttcggtgctggtgctgctctgcagatcccattcgctatgcagatggcctaccgcttcaacggaatcggtgtcacccagaacgtgctgtacgagaaccagaagctgatcgctaaccagttcaacagcgccatcggcaagatccaggactcactgagctctactgcctccgctctgggaaagctgcaggacgtcgtgaaccagaacgcccaggctctgaacaccctggtcaagcagctgtcatccaacttcggagctatcagctctgtgctgaacgacatcctctcccgcctggaccctcctgaggctgaagtccagatcgacaggctgatcactggtagactgcagagcctgcagacctacgtgactcagcagctgatccgcgccgctgaaatccgtgcctctgctaacctggctgctatcaagatgtcagagtgcgtcctgggacagtccaagagagtggacttctgcggcaagggataccacctgatgtcattccctcagtccgctccccacggtgtcgtgttcctgcacgtcacctacgtgccagcccaggagaagaacttcaccactgcccctgctatctgccacgacggcaaggctcacttcccccgcgaaggtgtcttcgtgagcaacggcacccactggttcgtcactcagcgtaacttctacgagccacagatcatcaccactgacaacactttcgtgtctggaaactgcgacgtggtcatcggtatcgtcaacaacaccgtgtacgaccccctgcagccagagctggacagcttcaaggaagagctggacaagtacttcaagaaccacacctctcccgacgtggacctgggcgacatcagcggaatcaacgcttctttcgtcaacatccagaaggagatcgaccgtctgaacgaagtggccaagaacctgaacgaatcactgatcgacctgcaggagctgggcaagtacgaacagtacatcaagtggccatggtacatctggctgggtttcatcgctggcctcatcgctatcgtgatggtgaccatcatgctgtgctgcatgacttcatgctgctcctgcctgaagggctgctgcagctgcggatcttgctgcaagttcgacgaggacgactccgaacctgtcctgaagggagtgaagctgcactacacctaa

SEQ ID NO: 151 - protein, 1260 aa, synthetic construct
  REGION 1..1260: note = modified coronavirus S polypeptide
QCVNFTNRTQLPSAYTNSFTRGVYYPDKVFRSSVLHSTQDLFLPFFSNVTWFHAIHVSGTNGTKRFDNPVLPFNDGVYFASTEKSNIIRGWIFGTTLDSKTQSLLIVNNATNVVIKVCEFQFCNYPFLGVYYHKNNKSWMESEFRVYSSANNCTFEYVSQPFLMDLEGKQGNFKNLSEFVFKNIDGYFKIYSKHTPINLVRDLPQGFSALEPLVDLPIGINITRFQTLLALHRSYLTPGDSSSGWTAGAAAYYVGYLQPRTFLLKYNENGTITDAVDCALDPLSETKCTLKSFTVEKGIYQTSNFRVQPTESIVRFPNITNLCPFGEVFNATRFASVYAWNRKRISNCVADYSVLYNSASFSTFKCYGVSPTKLNDLCFTNVYADSFVIRGDEVRQIAPGQTGTIADYNYKLPDDFTGCVIAWNSNNLDSKVGGNYNYLYRLFRKSNLKPFERDISTEIYQAGSTPCNGVKGFNCYFPLQSYGFQPTYGVGYQPYRVVVLSFELLHAPATVCGPKKSTNLVKNKCVNFNFNGLTGTGVLTESNKKFLPFQQFGRDIADTTDAVRDPQTLEILDITPCSFGGVSVITPGTNTSNQVAVLYQGVNCTEVPVAIHADQLTPTWRVYSTGSNVFQTRAGCLIGAEYVNNSYECDIPIGAGICASYQTQTNSPQQAQSVASQSIIAYTMSLGAENSVAYSNNSIAIPTNFTISVTTEILPVSMTKTSVDCTMYICGDSTECSNLLLQYGSFCTQLNRALTGIAVEQDKNTQEVFAQVKQIYKTPPIKDFGGFNFSQILPDPSKPSKRSFIEDLLFNKVTLADAGFIKQYGDCLGDIAARDLICAQKFNGLTVLPPLLTDEMIAQYTSALLAGTITSGWTFGAGAALQIPFAMQMAYRFNGIGVTQNVLYENQKLIANQFNSAIGKIQDSLSSTASALGKLQDVVNQNAQALNTLVKQLSSNFGAISSVLNDILSRLDPPEAEVQIDRLITGRLQSLQTYVTQQLIRAAEIRASANLAAIKMSECVLGQSKRVDFCGKGYHLMSFPQSAPHGVVFLHVTYVPAQEKNFTTAPAICHDGKAHFPREGVFVSNGTHWFVTQRNFYEPQIITTDNTFVSGNCDVVIGIVNNTVYDPLQPELDSFKEELDKYFKNHTSPDVDLGDISGINASFVNIQKEIDRLNEVAKNLNESLIDLQELGKYEQYIKWPWYIWLGFIAGLIAIVMVTIMLCCMTSCCSCLKGCCSCGSCCKFDEDDSEPVLKGVKLHYT

SEQ ID NO: 152 - protein, 1273 aa, synthetic construct
  REGION 1..1273: note = modified coronavirus S polypeptide
MFVFLVLLPLVSIQCVNLTTRTQLPPAYTNSFTRGVYYPDKVFRSSVLHSTQDLFLPFFSNVTWFHAIHVSGTNGTKRFDNPVLPFNDGVYFASTEKSNIIRGWIFGTTLDSKTQSLLIVNNATNVVIKVCEFQFCNDPFLGVYYHKNNKSCMESEFRVYSSANNCTFEYVSQPFLMDLEGKQGNFKNLREFVFKNIDGYFKIYSKHTPINLVRDLPQGFSALEPLVDLPIGINITRFQTLLALHRSYLTPGDSSSGWTAGAAAYYVGYLQPRTFLLKYNENGTITDAVDCALDPLSETKCTLKSFTVEKGIYQTSNFRVQPTESIVRFPNITNLCPFGEVFNATRFASVYAWNRKRISNCVADYSVLYNSASFSTFKCYGVSPTKLNDLCFTNVYADSFVIRGDEVRQIAPGQTGKIADYNYKLPDDFTGCVIAWNSNNLDSKVGGNYNYRYRLFRKSNLKPFERDISTEIYQAGSTPCNGVEGFNCYFPLQPYGFQPTNGVGYQPYRVVVLSFELLHAPATVCGPKKSTNLVKNKCVNFNFNGLTGTGVLTESNKKFLPFQQFGRDIADTTDAVRDPQTLEILDITPCSFGGVSVITPGTNTSNQVAVLYQGVNCTEVPVAIHADQLTPTWRVYSTGSNVFQTRAGCLIGAEHVNNSYECDIPIGAGICASYQTQTNSPQQAQSVASQSIIAYTMSLGAENSVAYSNNSIAIPTNFTISVTTEILPVSMTKTSVDCTMYICGDSTECSNLLLQYGSFCTQLNRALTGIAVEQDKNTQEVFAQVKQIYKTPPIKDFGGFNFSQILPDPSKPSKRSFIEDLLFNKVTLADAGFIKQYGDCLGDIAARDLICAQKFNGLTVLPPLLTDEMIAQYTSALLAGTITSGWTFGAGAALQIPFAMQMAYRFNGIGVTQNVLYENQKLIANQFNSAIGKIQDSLSSTASALGKLQDVVNQNAQALNTLVKQLSSNFGAISSVLNDILSRLDPPEAEVQIDRLITGRLQSLQTYVTQQLIRAAEIRASANLAATKMSECVLGQSKRVDFCGKGYHLMSFPQSAPHGVVFLHVTYVPAQEKNFTTAPAICHDGKAHFPREGVFVSNGTHWFVTQRNFYEPQIITTDNTFVSGNCDVVIGIVNNTVYDPLQPELDSFKEELDKYFKNHTSPDVDLGDISGINASVVNIQKEIDRLNEVAKNLNESLIDLQELGKYEQYIKWPWYIWLGFIAGLIAIVMVTIMLCCMTSCCSCLKGCCSCGSCCKFDEDDSEPVLKGVKLHYT

SEQ ID NO: 153 - protein, 1260 aa, synthetic construct
  REGION 1..1260: note = modified coronavirus S polypeptide
QCVNLTTRTQLPPAYTNSFTRGVYYPDKVFRSSVLHSTQDLFLPFFSNVTWFHAIHVSGTNGTKRFDNPVLPFNDGVYFASTEKSNIIRGWIFGTTLDSKTQSLLIVNNATNVVIKVCEFQFCNDPFLGVYYHKNNKSCMESEFRVYSSANNCTFEYVSQPFLMDLEGKQGNFKNLREFVFKNIDGYFKIYSKHTPINLVRDLPQGFSALEPLVDLPIGINITRFQTLLALHRSYLTPGDSSSGWTAGAAAYYVGYLQPRTFLLKYNENGTITDAVDCALDPLSETKCTLKSFTVEKGIYQTSNFRVQPTESIVRFPNITNLCPFGEVFNATRFASVYAWNRKRISNCVADYSVLYNSASFSTFKCYGVSPTKLNDLCFTNVYADSFVIRGDEVRQIAPGQTGKIADYNYKLPDDFTGCVIAWNSNNLDSKVGGNYNYRYRLFRKSNLKPFERDISTEIYQAGSTPCNGVEGFNCYFPLQPYGFQPTNGVGYQPYRVVVLSFELLHAPATVCGPKKSTNLVKNKCVNFNFNGLTGTGVLTESNKKFLPFQQFGRDIADTTDAVRDPQTLEILDITPCSFGGVSVITPGTNTSNQVAVLYQGVNCTEVPVAIHADQLTPTWRVYSTGSNVFQTRAGCLIGAEHVNNSYECDIPIGAGICASYQTQTNSPQQAQSVASQSIIAYTMSLGAENSVAYSNNSIAIPTNFTISVTTEILPVSMTKTSVDCTMYICGDSTECSNLLLQYGSFCTQLNRALTGIAVEQDKNTQEVFAQVKQIYKTPPIKDFGGFNFSQILPDPSKPSKRSFIEDLLFNKVTLADAGFIKQYGDCLGDIAARDLICAQKFNGLTVLPPLLTDEMIAQYTSALLAGTITSGWTFGAGAALQIPFAMQMAYRFNGIGVTQNVLYENQKLIANQFNSAIGKIQDSLSSTASALGKLQDVVNQNAQALNTLVKQLSSNFGAISSVLNDILSRLDPPEAEVQIDRLITGRLQSLQTYVTQQLIRAAEIRASANLAATKMSECVLGQSKRVDFCGKGYHLMSFPQSAPHGVVFLHVTYVPAQEKNFTTAPAICHDGKAHFPREGVFVSNGTHWFVTQRNFYEPQIITTDNTFVSGNCDVVIGIVNNTVYDPLQPELDSFKEELDKYFKNHTSPDVDLGDISGINASVVNIQKEIDRLNEVAKNLNESLIDLQELGKYEQYIKWPWYIWLGFIAGLIAIVMVTIMLCCMTSCCSCLKGCCSCGSCCKFDEDDSEPVLKGVKLHYT

SEQ ID NO: 154 - protein, 13 aa, synthetic construct
  REGION 1..13: note = N-terminal signal peptide
MFVFFVLLPLVSS

SEQ ID NO: 155 - protein, 1273 aa, synthetic construct
  REGION 1..1273: note = modified coronavirus S polypeptide
MFVFFVLLPLVSSQCVNLTTRTQLPPAYTNSFTRGVYYPDKVFRSSVLHSTQDLFLPFFSNVTWFHAIHVSGTNGTKRFDNPVLPFNDGVYFASIEKSNIIRGWIFGTTLDSKTQSLLIVNNATNVVIKVCEFQFCNDPFLGVYYHKNNKSWMESEFRVYSSANNCTFEYVSQPFLMDLEGKQGNFKNLREFVFKNIDGYFKIYSKHTPINLVRDLPQGFSALEPLVDLPIGINITRFQTLLALHRSYLTPGGSSSGWTAGAAAYYVGYLQPRTFLLKYNENGTITDAVDCALDPLSETKCTLKSFTVEKGIYQTSNFRVQPTESIVRFPNITNLCPFGEVFNATRFASVYAWNRKRISNCVADYSVLYNSASFSTFKCYGVSPTKLNDLCFTNVYADSFVIRGDEVRQIAPGQTGKIADYNYKLPDDFTGCVIAWNSNNLDSKVGGNYNYLYRLFRKSNLKPFERDISTEIYQAGSTPCNGVKGFNCYFPLQSYGFQPTNGVGYQPYRVVVLSFELLHAPATVCGPKKSTNLVKNKCVNFNFNGLTGTGVLTESNKKFLPFQQFGRDIADTTDAVRDPQTLEILDITPCSFGGVSVITPGTNTSNQVAVLYQGVNCTEVPVAIHADQLTPTWRVYSTGSNVFQTRAGCLIGAEHVNNSYECDIPIGAGICASYQTQTNSPQQAQSVASQSIIAYTMSLGVENSVAYSNNSIAIPTNFTISVTTEILPVSMTKTSVDCTMYICGDSTECSNLLLQYGSFCTQLNRALTGIAVEQDKNTQEVFAQVKQIYKTPPIKDFGGFNFSQILPDPSKPSKRSFIEDLLFNKVTLADAGFIKQYGDCLGDIAARDLICAQKFNGLTVLPPLLTDEMIAQYTSALLAGTITSGWTFGAGAALQIPFAMQMAYRFNGIGVTQNVLYENQKLIANQFNSAIGKIQDSLSSTASALGKLQDVVNQNAQALNTLVKQLSSNFGAISSVLNDILSRLDPPEAEVQIDRLITGRLQSLQTYVTQQLIRAAEIRASANLAATKMSECVLGQSKRVDFCGKGYHLMSFPQSAPHGVVFLHVTYVPAQEKNFTTAPAICHDGKAHFPREGVFVSNGTHWFVTQRNFYEPQIITTDNTFVSGNCDVVIGIVNNTVYDPLQPELDSFKEELDKYFKNHTSPDVDLGDISGINASVVNIQKEIDRLNEVAKNLNESLIDLQELGKYEQYIKWPWYIWLGFIAGLIAIVMVTIMLCCMTSCCSCLKGCCSCGSCCKFDEDDSEPVLKGVKLHYT

SEQ ID NO: 156 - protein, 1260 aa, synthetic construct
  REGION 1..1260: note = modified coronavirus S polypeptide
QCVNLTTRTQLPPAYTNSFTRGVYYPDKVFRSSVLHSTQDLFLPFFSNVTWFHAIHVSGTNGTKRFDNPVLPFNDGVYFASIEKSNIIRGWIFGTTLDSKTQSLLIVNNATNVVIKVCEFQFCNDPFLGVYYHKNNKSWMESEFRVYSSANNCTFEYVSQPFLMDLEGKQGNFKNLREFVFKNIDGYFKIYSKHTPINLVRDLPQGFSALEPLVDLPIGINITRFQTLLALHRSYLTPGGSSSGWTAGAAAYYVGYLQPRTFLLKYNENGTITDAVDCALDPLSETKCTLKSFTVEKGIYQTSNFRVQPTESIVRFPNITNLCPFGEVFNATRFASVYAWNRKRISNCVADYSVLYNSASFSTFKCYGVSPTKLNDLCFTNVYADSFVIRGDEVRQIAPGQTGKIADYNYKLPDDFTGCVIAWNSNNLDSKVGGNYNYLYRLFRKSNLKPFERDISTEIYQAGSTPCNGVKGFNCYFPLQSYGFQPTNGVGYQPYRVVVLSFELLHAPATVCGPKKSTNLVKNKCVNFNFNGLTGTGVLTESNKKFLPFQQFGRDIADTTDAVRDPQTLEILDITPCSFGGVSVITPGTNTSNQVAVLYQGVNCTEVPVAIHADQLTPTWRVYSTGSNVFQTRAGCLIGAEHVNNSYECDIPIGAGICASYQTQTNSPQQAQSVASQSIIAYTMSLGVENSVAYSNNSIAIPTNFTISVTTEILPVSMTKTSVDCTMYICGDSTECSNLLLQYGSFCTQLNRALTGIAVEQDKNTQEVFAQVKQIYKTPPIKDFGGFNFSQILPDPSKPSKRSFIEDLLFNKVTLADAGFIKQYGDCLGDIAARDLICAQKFNGLTVLPPLLTDEMIAQYTSALLAGTITSGWTFGAGAALQIPFAMQMAYRFNGIGVTQNVLYENQKLIANQFNSAIGKIQDSLSSTASALGKLQDVVNQNAQALNTLVKQLSSNFGAISSVLNDILSRLDPPEAEVQIDRLITGRLQSLQTYVTQQLIRAAEIRASANLAATKMSECVLGQSKRVDFCGKGYHLMSFPQSAPHGVVFLHVTYVPAQEKNFTTAPAICHDGKAHFPREGVFVSNGTHWFVTQRNFYEPQIITTDNTFVSGNCDVVIGIVNNTVYDPLQPELDSFKEELDKYFKNHTSPDVDLGDISGINASVVNIQKEIDRLNEVAKNLNESLIDLQELGKYEQYIKWPWYIWLGFIAGLIAIVMVTIMLCCMTSCCSCLKGCCSCGSCCKFDEDDSEPVLKGVKLHYT

SEQ ID NO: 157 - protein, 1273 aa, synthetic construct
  REGION 1..1273: note = modified coronavirus S polypeptide
MFVFFVLLPLVSSQCVNLTTRTQLPPAYTNSFTRGVYYPDKVFRSSVLHSTQDLFLPFFSNVTWFHAIHVSGTNGTKRFDNPVLPFNDGVYFASIEKSNIIRGWIFGTTLDSKTQSLLIVNNATNVVIKVCEFQFCNDPFLGVYYHKNNKSWMESEFRVYSSANNCTFEYVSQPFLMDLEGKQGNFKNLREFVFKNIDGYFKIYSKHTPINLVRDLPQGFSALEPLVDLPIGINITRFQTLLALHRSYLTPGGSSSGWTAGAAAYYVGYLQPRTFLLKYNENGTITDAVDCALDPLSETKCTLKSFTVEKGIYQTSNFRVQPTESIVRFPNITNLCPFGEVFNATRFASVYAWNRKRISNCVADYSVLYNSASFSTFKCYGVSPTKLNDLCFTNVYADSFVIRGDEVRQIAPGQTGKIADYNYKLPDDFTGCVIAWNSNNLDSKVGGNYNYLYRLFRKSNLKPFERDISTEIYQAGNTPCNGVEGFNCYFPLQSYGFQPTNGVGYQPYRVVVLSFELLHAPATVCGPKKSTNLVKNKCVNFNFNGLTGTGVLTESNKKFLPFQQFGRDIADTTDAVRDPQTLEILDITPCSFGGVSVITPGTNTSNQVAVLYQGVNCTEVPVAIHADQLTPTWRVYSTGSNVFQTRAGCLIGAEHVNNSYECDIPIGAGICASYQTQTNSPQQAQSVASQSIIAYTMSLGVENSVAYSNNSIAIPTNFTISVTTEILPVSMTKTSVDCTMYICGDSTECSNLLLQYGSFCTQLNRALTGIAVEQDKNTQEVFAQVKQIYKTPPIKDFGGFNFSQILPDPSKPSKRSFIEDLLFNKVTLADAGFIKQYGDCLGDIAARDLICAQKFNGLTVLPPLLTDEMIAQYTSALLAGTITSGWTFGAGAALQIPFAMQMAYRFNGIGVTQNVLYENQKLIANQFNSAIGKIQDSLSSTASALGKLQDVVNQNAQALNTLVKQLSSNFGAISSVLNDILSRLDPPEAEVQIDRLITGRLQSLQTYVTQQLIRAAEIRASANLAATKMSECVLGQSKRVDFCGKGYHLMSFPQSAPHGVVFLHVTYVPAQEKNFTTAPAICHDGKAHFPREGVFVSNGTHWFVTQRNFYEPQIITTDNTFVSGNCDVVIGIVNNTVYDPLQPELDSFKEELDKYFKNHTSPDVDLGDISGINASVVNIQKEIDRLNEVAKNLNESLIDLQELGKYEQYIKWPWYIWLGFIAGLIAIVMVTIMLCCMTSCCSCLKGCCSCGSCCKFDEDDSEPVLKGVKLHYT

SEQ ID NO: 158 - protein, 1260 aa, synthetic construct
  REGION 1..1260: note = modified coronavirus S polypeptide
QCVNLTTRTQLPPAYTNSFTRGVYYPDKVFRSSVLHSTQDLFLPFFSNVTWFHAIHVSGTNGTKRFDNPVLPFNDGVYFASIEKSNIIRGWIFGTTLDSKTQSLLIVNNATNVVIKVCEFQFCNDPFLGVYYHKNNKSWMESEFRVYSSANNCTFEYVSQPFLMDLEGKQGNFKNLREFVFKNIDGYFKIYSKHTPINLVRDLPQGFSALEPLVDLPIGINITRFQTLLALHRSYLTPGGSSSGWTAGAAAYYVGYLQPRTFLLKYNENGTITDAVDCALDPLSETKCTLKSFTVEKGIYQTSNFRVQPTESIVRFPNITNLCPFGEVFNATRFASVYAWNRKRISNCVADYSVLYNSASFSTFKCYGVSPTKLNDLCFTNVYADSFVIRGDEVRQIAPGQTGKIADYNYKLPDDFTGCVIAWNSNNLDSKVGGNYNYLYRLFRKSNLKPFERDISTEIYQAGNTPCNGVEGFNCYFPLQSYGFQPTNGVGYQPYRVVVLSFELLHAPATVCGPKKSTNLVKNKCVNFNFNGLTGTGVLTESNKKFLPFQQFGRDIADTTDAVRDPQTLEILDITPCSFGGVSVITPGTNTSNQVAVLYQGVNCTEVPVAIHADQLTPTWRVYSTGSNVFQTRAGCLIGAEHVNNSYECDIPIGAGICASYQTQTNSPQQAQSVASQSIIAYTMSLGVENSVAYSNNSIAIPTNFTISVTTEILPVSMTKTSVDCTMYICGDSTECSNLLLQYGSFCTQLNRALTGIAVEQDKNTQEVFAQVKQIYKTPPIKDFGGFNFSQILPDPSKPSKRSFIEDLLFNKVTLADAGFIKQYGDCLGDIAARDLICAQKFNGLTVLPPLLTDEMIAQYTSALLAGTITSGWTFGAGAALQIPFAMQMAYRFNGIGVTQNVLYENQKLIANQFNSAIGKIQDSLSSTASALGKLQDVVNQNAQALNTLVKQLSSNFGAISSVLNDILSRLDPPEAEVQIDRLITGRLQSLQTYVTQQLIRAAEIRASANLAATKMSECVLGQSKRVDFCGKGYHLMSFPQSAPHGVVFLHVTYVPAQEKNFTTAPAICHDGKAHFPREGVFVSNGTHWFVTQRNFYEPQIITTDNTFVSGNCDVVIGIVNNTVYDPLQPELDSFKEELDKYFKNHTSPDVDLGDISGINASVVNIQKEIDRLNEVAKNLNESLIDLQELGKYEQYIKWPWYIWLGFIAGLIAIVMVTIMLCCMTSCCSCLKGCCSCGSCCKFDEDDSEPVLKGVKLHYT

SEQ ID NO: 159 - protein, 1271 aa, synthetic construct
  REGION 1..1271: note = recombinant coronavirus Spike (S) polypeptide
MFVFLVLLPLVSSQCVNLTTRTQLPPAYTNSFTRGVYYPDKVFRSSVLHSTQDLFLPFFSNVTWFHVIHVSGTNGTKRFDNPVLPFNDGVYFASIEKSNIIRGWIFGTTLDSKTQSLLIVNNATNVVIKVCEFQFCNDPFLDVYYHKNNKSWMESEFRVYSSANNCTFEYVSQPFLMDLEGKQGNFKNLREFVFKNIDGYFKIYSKHTPINIVRDLPQGFSALEPLVDLPIGINITRFQTLLALHRSYLPGDSSSGWTAGAAAYYVGYLQPRTFLLKYNENGTITDAVDCALDPLSETKCTLKSFTVEKGIYQTSNFRVQPTESIVRFPNITNLCPFDEVFNATRFASVYAWNRKRISNCVADYSVLYNLAPFFTFKCYGVSPTKLNDLCFTNVYADSFVIRGDEVRQIAPGQTGNIADYNYKLPDDFTGCVIAWNSNKLDSKVSGNYNYLYRLFRKSNLKPFERDISTEIYQAGNKPCNGVAGFNCYFPLRSYSFRPTYGVGHQPYRVVVLSFELLHAPATVCGPKKSTNLVKNKCVNFNFNGLKGTGVLTESNKKFLPFQQFGRDIADTTDAVRDPQTLEILDITPCSFGGVSVITPGTNTSNQVAVLYQGVNCTEVPVAIHADQLTPTWRVYSTGSNVFQTRAGCLIGAEYVNNSYECDIPIGAGICASYQTQTKSHQQAQSVASQSIIAYTMSLGAENSVAYSNNSIAIPTNFTISVTTEILPVSMTKTSVDCTMYICGDSTECSNLLLQYGSFCTQLKRALTGIAVEQDKNTQEVFAQVKQIYKTPPIKYFGGFNFSQILPDPSKPSKRSFIEDLLFNKVTLADAGFIKQYGDCLGDIAARDLICAQKFKGLTVLPPLLTDEMIAQYTSALLAGTITSGWTFGAGAALQIPFAMQMAYRFNGIGVTQNVLYENQKLIANQFNSAIGKIQDSLSSTASALGKLQDVVNHNAQALNTLVKQLSSKFGAISSVLNDIFSRLDPPEAEVQIDRLITGRLQSLQTYVTQQLIRAAEIRASANLAATKMSECVLGQSKRVDFCGKGYHLMSFPQSAPHGVVFLHVTYVPAQEKNFTTAPAICHDGKAHFPREGVFVSNGTHWFVTQRNFYEPQIITTDNTFVSGNCDVVIGIVNNTVYDPLQPELDSFKELDKYFKNHTSPDVDLGDISGINASVVNIQKEIDRLNEVAKNLNESLIDLQELGKYEQYIKWPWYIWLGFIAGLIAIVMVTIMLCCMTSCCSCLKGCCSCGSCCKFDEDDSEPVLKGVKLHYT

SEQ ID NO: 160 - protein, 1270 aa, synthetic construct
  REGION 1..1270: note = recombinant coronavirus Spike (S) polypeptide
MFVFLVLLPLVSSQCVNLTTRTQLPPAYTNSFTRGVYYPDKVFRSSVLHSTQDLFLPFFSNVTWFHVISGTNGTKRFDNPVLPFNDGVYFASIEKSNIIRGWIFGTTLDSKTQSLLIVNNATNVVIKVCEFQFCNDPFLDHKNNKSWMESEFRVYSSANNCTFEYVSQPFLMDLEGKQGNFKNLREFVFKNIDGYFKIYSKHTPIIVREPEDLPQGFSALEPLVDLPIGINITRFQTLLALHRSYLTPGDSSSGWTAGAAAYYVGYLQPRTFLLKYNENGTITDAVDCALDPLSETKCTLKSFTVEKGIYQTSNFRVQPTESIVRFPNITNLCPFDEVFNATRFASVYAWNRKRISNCVADYSVLYNLAPFFTFKCYGVSPTKLNDLCFTNVYADSFVIRGDEVRQIAPGQTGNIADYNYKLPDDFTGCVIAWNSNKLDSKVSGNYNYLYRLFRKSNLKPFERDISTEIYQAGNKPCNGVAGFNCYFPLRSYSFRPTYGVGHQPYRVVVLSFELLHAPATVCGPKKSTNLVKNKCVNFNFNGLKGTGVLTESNKKFLPFQQFGRDIADTTDAVRDPQTLEILDITPCSFGGVSVITPGTNTSNQVAVLYQGVNCTEVPVAIHADQLTPTWRVYSTGSNVFQTRAGCLIGAEYVNNSYECDIPIGAGICASYQTQTKSHQQAQSVASQSIIAYTMSLGAENSVAYSNNSIAIPTNFTISVTTEILPVSMTKTSVDCTMYICGDSTECSNLLLQYGSFCTQLKRALTGIAVEQDKNTQEVFAQVKQIYKTPPIKYFGGFNFSQILPDPSKPSKRSFIEDLLFNKVTLADAGFIKQYGDCLGDIAARDLICAQKFKGLTVLPPLLTDEMIAQYTSALLAGTITSGWTFGAGAALQIPFAMQMAYRFNGIGVTQNVLYENQKLIANQFNSAIGKIQDSLSSTASALGKLQDVVNHNAQALNTLVKQLSSKFGAISSVLNDIFSRLDPPEAEVQIDRLITGRLQSLQTYVTQQLIRAAEIRASANLAATKMSECVLGQSKRVDFCGKGYHLMSFPQSAPHGVVFLHVTYVPAQEKNFTTAPAICHDGKAHFPREGVFVSNGTHWFVTQRNFYEPQIITTDNTFVSGNCDVVIGIVNNTVYDPLQPELDSFKEELDKYFKNHTSPDVDLGDISGINASVVNIQKEIDRLNEVAKNLNESLIDLQELGKYEQYIKWPWYIWLGFIAGLIAIVMVTIMLCCMTSCCSCLKGCCSCGSCCKFDEDDSEPVLKGVKLHYT

SEQ ID NO: 161 - DNA, 3819 bp, synthetic construct
  misc_feature 1..3819: note = encodes recombinant coronavirus Spike (S) polypeptide
  source 1..3819: mol_type = other DNA
atgtttgtattcttagtattgctgcccctagtgagcagccagtgtgttaatctgacgacgcggacccaacttcctccagcctacacaaactcttttacgcgcggggtctattacccggacaaagtgttccgttcgagtgttttgcatagcacccaggatttattcctaccattcttttcaaatgttacctggttccatgtgattcacgtctccggtactaatggaactaaacggttcgacaaccccgttttgccgttcaacgatggggtgtacttcgcttctattgagaagtcgaatatcatacgtgggtggattttcggcacgaccttggatagtaaaactcagtcgttacttatagtaaataatgctaccaatgttgtgattaaggtgtgtgagttccagttttgtaatgatccctttcttgacgtctattatcataaaaataacaaatcatggatggaatcggagtttcgggtgtattcctctgcgaacaactgtacatttgaatatgtgtctcagccgttcctgatggatttggagggtaagcaaggcaactttaagaatttgcgagagttcgtcttcaagaacatagatggatactttaaaatttatagcaagcacacaccgattaatatagtgcgagaccttcctcaaggtttctcggcccttgagccgctagtggacctgcccattggaattaatatcacccggtttcagactctgcttgcccttcatcgttcttatctgacccctggcgattcttcatcaggatggacggctggggctgccgcctattatgtcggataccttcaaccaaggacttttctcctcaagtataacgagaacggaacaattacagatgcagtcgattgcgccctagaccctctgtcggaaacgaagtgcaccttgaagagttttacagtagagaaggggatttaccagaccagtaacttcagggtccaaccgaccgaatccatcgtccgatttccaaatataactaatttatgtccgtttgacgaggtcttcaacgcaactcggttcgcgtcagtttatgcgtggaaccgcaaaagaataagcaactgcgtagctgactattccgttctctacaactctgcgccgttttttacttttaaatgctatggagtaagtccaacaaaattaaatgatctatgttttacaaatgtgtacgcagactcgtttgtaataaggggtgacgaagttcgtcagatagcaccagggcaaactgggaatattgcagactacaactataagctacccgatgacttcactggctgcgtcatcgcttggaatagtaataaattagatagtaaggtgagtgggaattataattacctatatcgtctctttagaaaaagtaacctcaagccattcgaacgcgacatttctacagaaatctatcaagctggcaataaaccttgcaacggtgtcgcgggcttcaactgctactttccccttaggtcgtactcttttcgacctacctatggtgtgggccaccagccctatagagttgttgtcctatcttttgaactattacatgccccagcgacggtatgcggacccaagaagtcgactaatttagtaaagaacaaatgcgttaattttaattttaatggccttaaagggacaggtgttttaacggaatcgaataaaaaattcttacctttccagcaatttggacgcgacatagctgatacgacggatgcagtcagagaccctcagacactggagatactggacataaccccgtgcagcttcgggggagtctccgtaataacccctgggacgaacacatccaatcaggtagcagtattatatcaaggcgtcaattgtacagaagttcctgtcgctatccatgcagatcaactcaccccgacctggcgcgtttatagcactgggagtaatgtattccaaactcgtgcaggatgtcttatcggggctgaatacgtgaataactcatacgagtgtgacattccaattggagctggcatatgtgccagctatcaaactcaaacgaagtcccaccaacaggcacagtctgtcgcgtctcaatcgatcattgcctatacaatgagtcttggtgccgaaaattcagttgcatatagcaacaactcaatagcgatacctactaatttcacaatcagtgtgaccaccgaaattctcccagtatcgatgacaaagacatccgtggattgtactatgtacatctgtggagactcgacggagtgctccaacttactccttcagtacgggtccttttgcactcaattaaagagggccctaacaggcattgctgttgagcaagacaagaacacgcaagaggtatttgcacaggtgaagcaaatatacaagacaccaccaattaagtactttggaggttttaacttctctcagatactcccagatcccagcaaaccctctaaacggagcttcatagaagacctcttgtttaataaagtgactttagctgatgcaggctttatcaagcaatatggggattgtttgggggatattgccgcccgcgacctcatctgcgcccagaaattcaagggtctaacagtattaccaccgctcctgacagacgagatgatcgctcaatacacttctgcgctgttggccgggacaattacgtctgggtggaccttcggcgcaggtgccgccttgcagatcccatttgcgatgcaaatggcgtatcgttttaacggtataggtgtcacacaaaacgtattatacgaaaaccagaaactaatagctaaccaatttaactcagcaataggaaaaatacaggattctctttcctctacggcgagcgccctcgggaaacttcaggatgtagtgaaccataacgctcaagcacttaataccctggttaagcaactatcaagcaagttcggtgctatctcatcagtgcttaatgacatcttcagtcgactagatcccccggaagcagaagttcaaatcgacagattgataactggccgcttgcaatctctacaaacatacgttacccagcagctgattcgggctgcggaaatccgagcatcggccaacctcgccgcgactaaaatgagcgagtgcgtattgggccagagtaaaagggttgacttctgcggtaagggctaccaccttatgagttttccgcagagtgcgcctcacggagttgtcttcctccacgtgacgtatgtgccggcacaggaaaaaaatttcaccaccgcccctgcgatatgtcatgatggtaaggcgcactttccaagagagggtgtctttgtttcaaatggaacccactggttcgttactcaacgtaatttttacgaacctcagattatcactacggataatacgttcgtgtcaggaaactgcgacgtggtaattggtatagtaaataatactgtgtatgatcccctccagccggagctggactcattcaaagaggaattagataagtacttcaaaaatcacacaagccctgatgtggacttgggagatatctcaggaattaacgcttccgttgtcaacatccaaaaagagatagacaggctgaatgaagtagcgaaaaacctgaacgaatccctgattgacttgcaagagctgggcaaatacgaacagtatattaaatggccctggtatatttggttggggttcatcgctggtttaatcgctattgttatggtcaccattatgctttgttgtatgacgtcctgttgttcttgtctaaagggctgctgttcgtgcggttcctgctgtaaattcgatgaggatgactccgaacccgttctgaaaggcgtcaagctccattatact

SEQ ID NO: 162 - DNA, 3810 bp, synthetic construct
  misc_feature 1..3810: note = encodes recombinant coronavirus Spike (S) polypeptide
  source 1..3810: mol_type = other DNA
atgtttgtttttctcgtactacttccactagtatctagccaatgtgtaaatttaaccacgaggacgcagctgcctccggcatatacgaatagtttcactaggggagtctattatccagataaagtgttccgaagcagtgttctacattcaacacaggacctcttccttcctttctttagcaacgtcacgtggttccatgtcataagcggcacaaacggcacaaagcgcttcgataatccggtgcttccgtttaacgatggggtttattttgcttctattgaaaagagcaacattatacgcggttggatcttcggaactacattggatagtaaaacgcaatcattgctaatcgttaataacgcgactaatgtagtgattaaggtgtgcgagttccagttttgcaatgacccctttttggatcataaaaataataaatcgtggatggaatcagaatttcgtgtatattcaagcgcaaacaactgtacgttcgagtacgtgagtcagcccttcttgatggatctggaagggaagcagggcaattttaaaaacttacgtgagtttgtatttaagaatatcgacgggtatttcaagatttactcaaagcacacaccgattattgttcgagagccggaagatttaccccaaggcttctcagcactggaacccttggtagacctacctatcggtattaatataacccgcttccaaaccttgttagcgctgcatcggagttatttaacccccggagactcatcgagcgggtggaccgccggggctgcagcttattacgtggggtatttacaaccacggacgttcttactcaagtacaacgagaacgggacgattactgatgccgtcgactgtgctttggacccgctgagcgaaaccaagtgcacactcaagtctttcacggtagagaaggggatctaccagacatcaaattttcgggtacaaccaacggagtccatcgtacgctttccgaatatcacgaatctttgtccattcgatgaggtattcaatgctacgcgttttgcgagtgtgtacgcgtggaataggaagcgtatctcaaattgcgtcgctgattactccgtactctataacagcgcgcccttctttaccttcaaatgctacggggtttctcctactaaactaaacgatctatgttttacgaacgtctacgcagacagctttgttatacgaggggacgaggttcggcagatcgcccccggccaaacaggaaacatcgccgactataattacaaactcccagatgactttactggttgcgtaattgcgtggaactctaacaagttagactccaaggtctcgggaaactacaattacctgtaccgtctcttcagaaaatctaacttaaagcctttcgagcgagatattagcactgaaatctatcaggcgggtaataaaccctgtaacggggtcgccggttttaactgctactttcctcttcggtcgtattcctttcgcccgacctatggagttggacaccaaccttatagagtcgttgttctaagttttgaattgctccatgccccggcgacggtatgcgggccaaagaaaagtactaatctcgttaagaataaatgtgtgaatttcaactttaacggacttaaaggtacgggcgtattgaccgagtcaaataaaaagtttttacccttccagcaatttggtagggatatcgcggatactactgacgcagtgagagatccacaaacacttgaaatcctagacatcaccccttgtagttttgggggagtgtctgtaatcacccctggtacaaacacttctaaccaagtcgcggttctttatcagggtgttaattgtacagaagtgcctgtcgccattcatgcagaccagctgacgcccacttggcgcgtctactcgacgggatctaatgtctttcagactcgagctggatgcctcatcggggcagaatacgtgaacaactcctatgaatgcgatattcctatcggtgctggcatttgcgcatcttatcaaacacagaccaaaagtcatcagcaagcgcaatccgttgccagtcaatctataattgcgtatacaatgtccttgggcgcggaaaattcagtcgcgtatagcaacaattctatcgctattccaacgaattttactatatcggtcacaacagagatactaccagtgtcgatgactaagacttcggtagattgcacaatgtacatatgcggagacagcacagaatgctcgaacctacttcttcaatatggttctttttgcactcagctcaagagagctcttactggcatagcagtggagcaagataaaaatacccaggaagtgtttgctcaagtaaaacagatatataaaacccctccgatcaaatattttggaggttttaacttctcacaaatactaccggacccttccaaaccatcgaaacggtccttcatagaggacttgctctttaataaggtaactttggcggatgctggttttataaagcagtatggagattgtcttggtgacatagcggccagagacctcatctgtgcacagaaattcaaaggtctaacagtacttccgcccctgctaacggacgagatgatagctcaatacaccagtgcccttctggctggaacgataaccagtggatggaccttcggcgcaggtgccgcactgcagattccgttcgcaatgcagatggcctatcggtttaatgggatcggcgtcactcaaaatgtattgtacgaaaatcagaaactcattgccaaccaattcaattcagcgataggcaagatccaggacagtctctcttccaccgcctccgccttaggtaagctacaagatgttgttaatcataacgctcaagcattgaatacgctggtaaaacaattgagcagcaaattcggcgcaattagctcagttttgaacgacatattctcccgacttgacccccccgaagctgaagtccaaatagataggctgataaccgggaggctacagtcactccaaacctacgtgactcaacagctcataagagcagccgaaataagagcctctgctaatctcgccgcgactaagatgtcagagtgtgttttaggtcaaagtaaaagggttgatttctgtggtaagggataccaccttatgtcctttccacaatcggctccacacggtgtggtctttctgcacgttacttatgtcccggctcaggagaagaatttcaccacagccccggctatttgtcatgacggcaaggcgcacttccccagagaaggcgtattcgtcagtaacggcactcactggttcgttactcaacgtaacttctacgaacctcagattataacgacagacaacacatttgtatcagggaactgtgatgtggtgatcggtatagtgaacaacacagtgtacgacccattacagccggagttagattctttcaaggaagagctggataagtacttcaagaatcacacctcgccagatgttgaccttggtgatatttcaggtataaacgcctctgtcgtgaatatccagaaagagatcgaccgtctcaacgaagtagcgaaaaatctaaacgaatcgttaattgaccttcaggagctggggaagtatgagcagtacattaagtggccctggtacatttggctgggctttattgcaggactgatagcaatagtgatggtcaccattatgttgtgctgcatgacatcctgctgctcttgtttaaaagggtgttgtagttgtggatcgtgttgcaagttcgacgaggatgattccgaacctgttctgaaaggcgtaaaattacactacaca

SEQ ID NO: 163 - DNA, 9308 bp, synthetic construct
  misc_feature 1..9308: note = encodes recombinant coronavirus Spike (S) polypeptide
  source 1..9308: mol_type = other DNA
ggaacggctccgcccactattaatgaaattaaaaattccaattttaaaaaacgcagcaagagaaacatttgtatgaaagaatgcgtagaaggaaagaaaaatgtcgtcgacatgctgaacaacaagattaatatgcctccgtgtataaaaaaaatattgaacgatttgaaagaaaacaatgtaccgcgcggcggtatgtacaggaagaggtttatactaaactgttacattgcaaacgtggtttcgtgtgccaagtgtgaaaaccgatgtttaatcaaggctctgacgcatttctacaaccacgactccaagtgtgtgggtgaagtcatgcatcttttaatcaaatcccaagatgtgtataaaccaccaaactgccaaaaaatgaaaactgtcgacaagctctgtccgtttgctggcaactgcaagggtctcaatcctatttgtaattattgaataataaaacaattataaatgctaaatttgttttttattaacgatacaaaccaaacgcaacaagaacatttgtagtattatctataattgaaaacgcgtagttataatcgctgaggtaatatttaaaatcattttcaaatgattcacagttaatttgcgacaatataattttattttcacataaactagacgccttgtcgtcttcttcttcgtattccttctctttttcatttttctcttcataaaaattaacatagttattatcgtatccatatatgtatctatcgtatagagtaaattttttgttgtcataaatatatatgtcttttttaatggggtgtatagtaccgctgcgcatagtttttctgtaatttacaacagtgctattttctggtagttcttcggagtgtgttgctttaattattaaatttatataatcaatgaatttgggatcgtcggttttgtacaatatgttgccggcatagtacgcagcttcttctagttcaattacaccattttttagcagcaccggattaacataactttccaaaatgttgtacgaaccgttaaacaaaaacagttcacctcccttttctatactattgtctgcgagcagttgtttgttgttaaaaataacagccattgtaatgagacgcacaaactaatatcacaaactggaaatgtctatcaatatatagttgctgatcagatctgatcatggagataattaaaatgataaccatctcgcaaataaataagtattttactgttttcgtaacagttttgtaataaaaaaacctataaatataggatccgccaccatgtttgtattcttagtattgctgcccctagtgagcagccagtgtgttaatctgacgacgcggacccaacttcctccagcctacacaaactcttttacgcgcggggtctattacccggacaaagtgttccgttcgagtgttttgcatagcacccaggatttattcctaccattcttttcaaatgttacctggttccatgtgattcacgtctccggtactaatggaactaaacggttcgacaaccccgttttgccgttcaacgatggggtgtacttcgcttctattgagaagtcgaatatcatacgtgggtggattttcggcacgaccttggatagtaaaactcagtcgttacttatagtaaataatgctaccaatgttgtgattaaggtgtgtgagttccagttttgtaatgatccctttcttgacgtctattatcataaaaataacaaatcatggatggaatcggagtttcgggtgtattcctctgcgaacaactgtacatttgaatatgtgtctcagccgttcctgatggatttggagggtaagcaaggcaactttaagaatttgcgagagttcgtcttcaagaacatagatggatactttaaaatttatagcaagcacacaccgattaatatagtgcgagaccttcctcaaggtttctcggcccttgagccgctagtggacctgcccattggaattaatatcacccggtttcagactctgcttgcccttcatcgttcttatctgacccctggcgattcttcatcaggatggacggctggggctgccgcctattatgtcggataccttcaaccaaggacttttctcctcaagtataacgagaacggaacaattacagatgcagtcgattgcgccctagaccctctgtcggaaacgaagtgcaccttgaagagttttacagtagagaaggggatttaccagaccagtaacttcagggtccaaccgaccgaatccatcgtccgatttccaaatataactaatttatgtccgtttgacgaggtcttcaacgcaactcggttcgcgtcagtttatgcgtggaaccgcaaaagaataagcaactgcgtagctgactattccgttctctacaactctgcgccgttttttacttttaaatgctatggagtaagtccaacaaaattaaatgatctatgttttacaaatgtgtacgcagactcgtttgtaataaggggtgacgaagttcgtcagatagcaccagggcaaactgggaatattgcagactacaactataagctacccgatgacttcactggctgcgtcatcgcttggaatagtaataaattagatagtaaggtgagtgggaattataattacctatatcgtctctttagaaaaagtaacctcaagccattcgaacgcgacatttctacagaaatctatcaagctggcaataaaccttgcaacggtgtcgcgggcttcaactgctactttccccttaggtcgtactcttttcgacctacctatggtgtgggccaccagccctatagagttgttgtcctatcttttgaactattacatgccccagcgacggtatgcggacccaagaagtcgactaatttagtaaagaacaaatgcgttaattttaattttaatggccttaaagggacaggtgttttaacggaatcgaataaaaaattcttacctttccagcaatttggacgcgacatagctgatacgacggatgcagtcagagaccctcagacactggagatactggacataaccccgtgcagcttcgggggagtctccgtaataacccctgggacgaacacatccaatcaggtagcagtattatatcaaggcgtcaattgtacagaagttcctgtcgctatccatgcagatcaactcaccccgacctggcgcgtttatagcactgggagtaatgtattccaaactcgtgcaggatgtcttatcggggctgaatacgtgaataactcatacgagtgtgacattccaattggagctggcatatgtgccagctatcaaactcaaacgaagtcccaccaacaggcacagtctgtcgcgtctcaatcgatcattgcctatacaatgagtcttggtgccgaaaattcagttgcatatagcaacaactcaatagcgatacctactaatttcacaatcagtgtgaccaccgaaattctcccagtatcgatgacaaagacatccgtggattgtactatgtacatctgtggagactcgacggagtgctccaacttactccttcagtacgggtccttttgcactcaattaaagagggccctaacaggcattgctgttgagcaagacaagaacacgcaagaggtatttgcacaggtgaagcaaatatacaagacaccaccaattaagtactttggaggttttaacttctctcagatactcccagatcccagcaaaccctctaaacggagcttcatagaagacctcttgtttaataaagtgactttagctgatgcaggctttatcaagcaatatggggattgtttgggggatattgccgcccgcgacctcatctgcgcccagaaattcaagggtctaacagtattaccaccgctcctgacagacgagatgatcgctcaatacacttctgcgctgttggccgggacaattacgtctgggtggaccttcggcgcaggtgccgccttgcagatcccatttgcgatgcaaatggcgtatcgttttaacggtataggtgtcacacaaaacgtattatacgaaaaccagaaactaatagctaaccaatttaactcagcaataggaaaaatacaggattctctttcctctacggcgagcgccctcgggaaacttcaggatgtagtgaaccataacgctcaagcacttaataccctggttaagcaactatcaagcaagttcggtgctatctcatcagtgcttaatgacatcttcagtcgactagatcccccggaagcagaagttcaaatcgacagattgataactggccgcttgcaatctctacaaacatacgttacccagcagctgattcgggctgcggaaatccgagcatcggccaacctcgccgcgactaaaatgagcgagtgcgtattgggccagagtaaaagggttgacttctgcggtaagggctaccaccttatgagttttccgcagagtgcgcctcacggagttgtcttcctccacgtgacgtatgtgccggcacaggaaaaaaatttcaccaccgcccctgcgatatgtcatgatggtaaggcgcactttccaagagagggtgtctttgtttcaaatggaacccactggttcgttactcaacgtaatttttacgaacctcagattatcactacggataatacgttcgtgtcaggaaactgcgacgtggtaattggtatagtaaataatactgtgtatgatcccctccagccggagctggactcattcaaagaggaattagataagtacttcaaaaatcacacaagccctgatgtggacttgggagatatctcaggaattaacgcttccgttgtcaacatccaaaaagagatagacaggctgaatgaagtagcgaaaaacctgaacgaatccctgattgacttgcaagagctgggcaaatacgaacagtatattaaatggccctggtatatttggttggggttcatcgctggtttaatcgctattgttatggtcaccattatgctttgttgtatgacgtcctgttgttcttgtctaaagggctgctgttcgtgcggttcctgctgtaaattcgatgaggatgactccgaacccgttctgaaaggcgtcaagctccattatacttaatgaaagcttgtcgagaagtactagaggatcataatcagccataccacatttgtagaggttttacttgctttaaaaaacctcccacacctccccctgaacctgaaacataaaatgaatgcaattgttgttgttaacttgtttattgcagcttataatggttacaaataaagcaatagcatcacaaatttcacaaataaagcatttttttcactgcattctagttgtggtttgtccaaactcatcaatgtatcttatcatgtctggatctgatcactgcttgagcctaggtagctgagcgcatgcaagctgatccgggttattagtacatttattaagcgctagattctgtgcgttgttgatttacagacaattgttgtacgtattttaataattcattaaatttataatctttagggtggtatgttagagcgaaaatcaaatgattttcagcgtctttatatctgaatttaaatattaaatcctcaatagatttgtaaaataggtttcgattagtttcaaacaagggttgtttttccgaaccgatggctggactatctaatggattttcgctcaacgccacaaaacttgccaaatcttgtagcagcaatctagctttgtcgatattcgtttgtgttttgttttgtaataaaggttcgacgtcgttcaaaatattatgcgcttttgtatttctttcatcactgtcgttagtgtacaattgactcgacgtaaacacgttaaatagagcttggacatatttaacatcgggcgtgttagctttattaggccgattatcgtcgtcgtcccaaccctcgtcgttagaagttgcttccgaagacgattttgccatagccacacgacgcctattaattgtgtcggctaacacgtccgcgatcaaatttgtagttgagctttttggaattatttctgattgcgggcgtttttgggcgggtttcaatctaactgtgcccgattttaattcagacaacacgttagaaagcgatggtgcaggcggtggtaacatttcagacggcaaatctactaatggcggcggtggtggagctgatgataaatctaccatcggtggaggcgcaggcggggctggcggcggaggcggaggcggaggtggtggcggtgatgcagacggcggtttaggctcaaatgtctctttaggcaacacagtcggcacctcaactattgtactggtttcgggcgccgtttttggtttgaccggtctgagacgagtgcgatttttttcgtttctaatagcttccaacaattgttgtctgtcgtctaaaggtgcagcgggttgaggttccgtcggcattggtggagcgggcggcaattcagacatcgatggtggtggtggtggtggaggcgctggaatgttaggcacgggagaaggtggtggcggcggtgccgccggtataatttgttctggtttagtttgttcgcgcacgattgtgggcaccggcgcaggcgccgctggctgcacaacggaaggtcgtctgcttcgaggcagcgcttggggtggtggcaattcaatattataattggaatacaaatcgtaaaaatctgctataagcattgtaatttcgctatcgtttaccgtgccgatatttaacaaccgctcaatgtaagcaattgtattgtaaagagattgtctcaagctcggatcgatcccgcacgccgataacaagccttttcatttttactacagcattgtagtggcgagacacttcgctgtcgtcgaggtttaaacgcttcctcgctcactgactcgctgcgctcggtcgttcggctgcggcgagcggtatcagctcactcaaaggcggtaatacggttatccacagaatcaggggataacgcaggaaagaacatgtgagcaaaaggccagcaaaaggccaggaaccgtaaaaaggccgcgttgctggcgtttttccataggctccgcccccctgacgagcatcacaaaaatcgacgctcaagtcagaggtggcgaaacccgacaggactataaagataccaggcgtttccccctggaagctccctcgtgcgctctcctgttccgaccctgccgcttaccggatacctgtccgcctttctcccttcgggaagcgtggcgctttctcatagctcacgctgtaggtatctcagttcggtgtaggtcgttcgctccaagctgggctgtgtgcacgaaccccccgttcagcccgaccgctgcgccttatccggtaactatcgtcttgagtccaacccggtaagacacgacttatcgccactggcagcagccactggtaacaggattagcagagcgaggtatgtaggcggtgctacagagttcttgaagtggtggcctaactacggctacactagaaggacagtatttggtatctgcgctctgctgaagccagttaccttcggaaaaagagttggtagctcttgatccggcaaacaaaccaccgctggtagcggtggtttttttgtttgcaagcagcagattacgcgcagaaaaaaaggatctcaagaagatcctttgatcttttctacggggtctgacgctcagtggaacgaaaactcacgttaagggattttggtcatgagattatcaaaaaggatcttcacctagatccttttaaattaaaaatgaagttttaaatcaatctaaagtatatatgagtaaacttggtctgacagttaccaatgcttaatcagtgaggcacctatctcagcgatctgtctatttcgttcatccatagttgcctgactccccgtcgtgtagataactacgatacgggagggcttaccatctggccccagtgctgcaatgataccgcgagacccacgctcaccggctccagatttatcagcaataaaccagccagccggaagggccgagcgcagaagtggtcctgcaactttatccgcctccatccagtctattaattgttgccgggaagctagagtaagtagttcgccagttaatagtttgcgcaacgttgttgccattgctacaggcatcgtggtgtcacgctcgtcgtttggtatggcttcattcagctccggttcccaacgatcaaggcgagttacatgatcccccatgttgtgcaaaaaagcggttagctccttcggtcctccgatcgttgtcagaagtaagttggccgcagtgttatcactcatggttatggcagcactgcataattctcttactgtcatgccatccgtaagatgcttttctgtgactggtgagtactcaaccaagtcattctgagaatagtgtatgcggcgaccgagttgctcttgcccggcgtcaatacgggataataccgcgccacatagcagaactttaaaagtgctcatcattggaaaacgttcttcggggcgaaaactctcaaggatcttaccgctgttgagatccagttcgatgtaacccactcgtgcacccaactgatcttcagcatcttttactttcaccagcgtttctgggtgagcaaaaacaggaaggcaaaatgccgcaaaaaagggaataagggcgacacggaaatgttgaatactcatactcttcctttttcaatattattgaagcatttatcagggttattgtctcatgagcggatacatatttgaatgtatttagaaaaataaacaaataggggttccgcgcacatttccccgaaaagtgccacctgacgcgccctgtagcggcgcattaagcgcggcgggtgtggtggttacgcgcagcgtgaccgctacacttgccagcgccctagcgcccgctcctttcgctttcttcccttcctttctcgccacgttcgccggctttccccgtcaagctctaaatcgggggctccctttagggttccgatttagtgctttacggcacctcgaccccaaaaaacttgattagggtgatggttcacgtagtgggccatcgccctgatagacggtttttcgccctttgacgttggagtccacgttctttaatagtggactcttgttccaaactggaacaacactcaaccctatctcggtctattcttttgatttataagggattttgccgatttcggcctattggttaaaaaatgagctgatttaacaaaaatttaacgcgaattttaacaaaatattaacgtttacaatttcccattcgccattcaggctgcgcaactgttgggaagggcgatcggtgcgggcctcttcgctattacgcca

SEQ ID NO: 164 - DNA, 9299 bp, synthetic construct
  misc_feature 1..9299: note = encodes recombinant coronavirus Spike (S) polypeptide
  source 1..9299: mol_type = other DNA
ggaacggctccgcccactattaatgaaattaaaaattccaattttaaaaaacgcagcaagagaaacatttgtatgaaagaatgcgtagaaggaaagaaaaatgtcgtcgacatgctgaacaacaagattaatatgcctccgtgtataaaaaaaatattgaacgatttgaaagaaaacaatgtaccgcgcggcggtatgtacaggaagaggtttatactaaactgttacattgcaaacgtggtttcgtgtgccaagtgtgaaaaccgatgtttaatcaaggctctgacgcatttctacaaccacgactccaagtgtgtgggtgaagtcatgcatcttttaatcaaatcccaagatgtgtataaaccaccaaactgccaaaaaatgaaaactgtcgacaagctctgtccgtttgctggcaactgcaagggtctcaatcctatttgtaattattgaataataaaacaattataaatgctaaatttgttttttattaacgatacaaaccaaacgcaacaagaacatttgtagtattatctataattgaaaacgcgtagttataatcgctgaggtaatatttaaaatcattttcaaatgattcacagttaatttgcgacaatataattttattttcacataaactagacgccttgtcgtcttcttcttcgtattccttctctttttcatttttctcttcataaaaattaacatagttattatcgtatccatatatgtatctatcgtatagagtaaattttttgttgtcataaatatatatgtcttttttaatggggtgtatagtaccgctgcgcatagtttttctgtaatttacaacagtgctattttctggtagttcttcggagtgtgttgctttaattattaaatttatataatcaatgaatttgggatcgtcggttttgtacaatatgttgccggcatagtacgcagcttcttctagttcaattacaccattttttagcagcaccggattaacataactttccaaaatgttgtacgaaccgttaaacaaaaacagttcacctcccttttctatactattgtctgcgagcagttgtttgttgttaaaaataacagccattgtaatgagacgcacaaactaatatcacaaactggaaatgtctatcaatatatagttgctgatcagatctgatcatggagataattaaaatgataaccatctcgcaaataaataagtattttactgttttcgtaacagttttgtaataaaaaaacctataaatataggatccgccaccatgtttgtttttctcgtactacttccactagtatctagccaatgtgtaaatttaaccacgaggacgcagctgcctccggcatatacgaatagtttcactaggggagtctattatccagataaagtgttccgaagcagtgttctacattcaacacaggacctcttccttcctttctttagcaacgtcacgtggttccatgtcataagcggcacaaacggcacaaagcgcttcgataatccggtgcttccgtttaacgatggggtttattttgcttctattgaaaagagcaacattatacgcggttggatcttcggaactacattggatagtaaaacgcaatcattgctaatcgttaataacgcgactaatgtagtgattaaggtgtgcgagttccagttttgcaatgacccctttttggatcataaaaataataaatcgtggatggaatcagaatttcgtgtatattcaagcgcaaacaactgtacgttcgagtacgtgagtcagcccttcttgatggatctggaagggaagcagggcaattttaaaaacttacgtgagtttgtatttaagaatatcgacgggtatttcaagatttactcaaagcacacaccgattattgttcgagagccggaagatttaccccaaggcttctcagcactggaacccttggtagacctacctatcggtattaatataacccgcttccaaaccttgttagcgctgcatcggagttatttaacccccggagactcatcgagcgggtggaccgccggggctgcagcttattacgtggggtatttacaaccacggacgttcttactcaagtacaacgagaacgggacgattactgatgccgtcgactgtgctttggacccgctgagcgaaaccaagtgcacactcaagtctttcacggtagagaaggggatctaccagacatcaaattttcgggtacaaccaacggagtccatcgtacgctttccgaatatcacgaatctttgtccattcgatgaggtattcaatgctacgcgttttgcgagtgtgtacgcgtggaataggaagcgtatctcaaattgcgtcgctgattactccgtactctataacagcgcgcccttctttaccttcaaatgctacggggtttctcctactaaactaaacgatctatgttttacgaacgtctacgcagacagctttgttatacgaggggacgaggttcggcagatcgcccccggccaaacaggaaacatcgccgactataattacaaactcccagatgactttactggttgcgtaattgcgtggaactctaacaagttagactccaaggtctcgggaaactacaattacctgtaccgtctcttcagaaaatctaacttaaagcctttcgagcgagatattagcactgaaatctatcaggcgggtaataaaccctgtaacggggtcgccggttttaactgctactttcctcttcggtcgtattcctttcgcccgacctatggagttggacaccaaccttatagagtcgttgttctaagttttgaattgctccatgccccggcgacggtatgcgggccaaagaaaagtactaatctcgttaagaataaatgtgtgaatttcaactttaacggacttaaaggtacgggcgtattgaccgagtcaaataaaaagtttttacccttccagcaatttggtagggatatcgcggatactactgacgcagtgagagatccacaaacacttgaaatcctagacatcaccccttgtagttttgggggagtgtctgtaatcacccctggtacaaacacttctaaccaagtcgcggttctttatcagggtgttaattgtacagaagtgcctgtcgccattcatgcagaccagctgacgcccacttggcgcgtctactcgacgggatctaatgtctttcagactcgagctggatgcctcatcggggcagaatacgtgaacaactcctatgaatgcgatattcctatcggtgctggcatttgcgcatcttatcaaacacagaccaaaagtcatcagcaagcgcaatccgttgccagtcaatctataattgcgtatacaatgtccttgggcgcggaaaattcagtcgcgtatagcaacaattctatcgctattccaacgaattttactatatcggtcacaacagagatactaccagtgtcgatgactaagacttcggtagattgcacaatgtacatatgcggagacagcacagaatgctcgaacctacttcttcaatatggttctttttgcactcagctcaagagagctcttactggcatagcagtggagcaagataaaaatacccaggaagtgtttgctcaagtaaaacagatatataaaacccctccgatcaaatattttggaggttttaacttctcacaaatactaccggacccttccaaaccatcgaaacggtccttcatagaggacttgctctttaataaggtaactttggcggatgctggttttataaagcagtatggagattgtcttggtgacatagcggccagagacctcatctgtgcacagaaattcaaaggtctaacagtacttccgcccctgctaacggacgagatgatagctcaatacaccagtgcccttctggctggaacgataaccagtggatggaccttcggcgcaggtgccgcactgcagattccgttcgcaatgcagatggcctatcggtttaatgggatcggcgtcactcaaaatgtattgtacgaaaatcagaaactcattgccaaccaattcaattcagcgataggcaagatccaggacagtctctcttccaccgcctccgccttaggtaagctacaagatgttgttaatcataacgctcaagcattgaatacgctggtaaaacaattgagcagcaaattcggcgcaattagctcagttttgaacgacatattctcccgacttgacccccccgaagctgaagtccaaatagataggctgataaccgggaggctacagtcactccaaacctacgtgactcaacagctcataagagcagccgaaataagagcctctgctaatctcgccgcgactaagatgtcagagtgtgttttaggtcaaagtaaaagggttgatttctgtggtaagggataccaccttatgtcctttccacaatcggctccacacggtgtggtctttctgcacgttacttatgtcccggctcaggagaagaatttcaccacagccccggctatttgtcatgacggcaaggcgcacttccccagagaaggcgtattcgtcagtaacggcactcactggttcgttactcaacgtaacttctacgaacctcagattataacgacagacaacacatttgtatcagggaactgtgatgtggtgatcggtatagtgaacaacacagtgtacgacccattacagccggagttagattctttcaaggaagagctggataagtacttcaagaatcacacctcgccagatgttgaccttggtgatatttcaggtataaacgcctctgtcgtgaatatccagaaagagatcgaccgtctcaacgaagtagcgaaaaatctaaacgaatcgttaattgaccttcaggagctggggaagtatgagcagtacattaagtggccctggtacatttggctgggctttattgcaggactgatagcaatagtgatggtcaccattatgttgtgctgcatgacatcctgctgctcttgtttaaaagggtgttgtagttgtggatcgtgttgcaagttcgacgaggatgattccgaacctgttctgaaaggcgtaaaattacactacacataatgaaagcttgtcgagaagtactagaggatcataatcagccataccacatttgtagaggttttacttgctttaaaaaacctcccacacctccccctgaacctgaaacataaaatgaatgcaattgttgttgttaacttgtttattgcagcttataatggttacaaataaagcaatagcatcacaaatttcacaaataaagcatttttttcactgcattctagttgtggtttgtccaaactcatcaatgtatcttatcatgtctggatctgatcactgcttgagcctaggtagctgagcgcatgcaagctgatccgggttattagtacatttattaagcgctagattctgtgcgttgttgatttacagacaattgttgtacgtattttaataattcattaaatttataatctttagggtggtatgttagagcgaaaatcaaatgattttcagcgtctttatatctgaatttaaatattaaatcctcaatagatttgtaaaataggtttcgattagtttcaaacaagggttgtttttccgaaccgatggctggactatctaatggattttcgctcaacgccacaaaacttgccaaatcttgtagcagcaatctagctttgtcgatattcgtttgtgttttgttttgtaataaaggttcgacgtcgttcaaaatattatgcgcttttgtatttctttcatcactgtcgttagtgtacaattgactcgacgtaaacacgttaaatagagcttggacatatttaacatcgggcgtgttagctttattaggccgattatcgtcgtcgtcccaaccctcgtcgttagaagttgcttccgaagacgattttgccatagccacacgacgcctattaattgtgtcggctaacacgtccgcgatcaaatttgtagttgagctttttggaattatttctgattgcgggcgtttttgggcgggtttcaatctaactgtgcccgattttaattcagacaacacgttagaaagcgatggtgcaggcggtggtaacatttcagacggcaaatctactaatggcggcggtggtggagctgatgataaatctaccatcggtggaggcgcaggcggggctggcggcggaggcggaggcggaggtggtggcggtgatgcagacggcggtttaggctcaaatgtctctttaggcaacacagtcggcacctcaactattgtactggtttcgggcgccgtttttggtttgaccggtctgagacgagtgcgatttttttcgtttctaatagcttccaacaattgttgtctgtcgtctaaaggtgcagcgggttgaggttccgtcggcattggtggagcgggcggcaattcagacatcgatggtggtggtggtggtggaggcgctggaatgttaggcacgggagaaggtggtggcggcggtgccgccggtataatttgttctggtttagtttgttcgcgcacgattgtgggcaccggcgcaggcgccgctggctgcacaacggaaggtcgtctgcttcgaggcagcgcttggggtggtggcaattcaatattataattggaatacaaatcgtaaaaatctgctataagcattgtaatttcgctatcgtttaccgtgccgatatttaacaaccgctcaatgtaagcaattgtattgtaaagagattgtctcaagctcggatcgatcccgcacgccgataacaagccttttcatttttactacagcattgtagtggcgagacacttcgctgtcgtcgaggtttaaacgcttcctcgctcactgactcgctgcgctcggtcgttcggctgcggcgagcggtatcagctcactcaaaggcggtaatacggttatccacagaatcaggggataacgcaggaaagaacatgtgagcaaaaggccagcaaaaggccaggaaccgtaaaaaggccgcgttgctggcgtttttccataggctccgcccccctgacgagcatcacaaaaatcgacgctcaagtcagaggtggcgaaacccgacaggactataaagataccaggcgtttccccctggaagctccctcgtgcgctctcctgttccgaccctgccgcttaccggatacctgtccgcctttctcccttcgggaagcgtggcgctttctcatagctcacgctgtaggtatctcagttcggtgtaggtcgttcgctccaagctgggctgtgtgcacgaaccccccgttcagcccgaccgctgcgccttatccggtaactatcgtcttgagtccaacccggtaagacacgacttatcgccactggcagcagccactggtaacaggattagcagagcgaggtatgtaggcggtgctacagagttcttgaagtggtggcctaactacggctacactagaaggacagtatttggtatctgcgctctgctgaagccagttaccttcggaaaaagagttggtagctcttgatccggcaaacaaaccaccgctggtagcggtggtttttttgtttgcaagcagcagattacgcgcagaaaaaaaggatctcaagaagatcctttgatcttttctacggggtctgacgctcagtggaacgaaaactcacgttaagggattttggtcatgagattatcaaaaaggatcttcacctagatccttttaaattaaaaatgaagttttaaatcaatctaaagtatatatgagtaaacttggtctgacagttaccaatgcttaatcagtgaggcacctatctcagcgatctgtctatttcgttcatccatagttgcctgactccccgtcgtgtagataactacgatacgggagggcttaccatctggccccagtgctgcaatgataccgcgagacccacgctcaccggctccagatttatcagcaataaaccagccagccggaagggccgagcgcagaagtggtcctgcaactttatccgcctccatccagtctattaattgttgccgggaagctagagtaagtagttcgccagttaatagtttgcgcaacgttgttgccattgctacaggcatcgtggtgtcacgctcgtcgtttggtatggcttcattcagctccggttcccaacgatcaaggcgagttacatgatcccccatgttgtgcaaaaaagcggttagctccttcggtcctccgatcgttgtcagaagtaagttggccgcagtgttatcactcatggttatggcagcactgcataattctcttactgtcatgccatccgtaagatgcttttctgtgactggtgagtactcaaccaagtcattctgagaatagtgtatgcggcgaccgagttgctcttgcccggcgtcaatacgggataataccgcgccacatagcagaactttaaaagtgctcatcattggaaaacgttcttcggggcgaaaactctcaaggatcttaccgctgttgagatccagttcgatgtaacccactcgtgcacccaactgatcttcagcatcttttactttcaccagcgtttctgggtgagcaaaaacaggaaggcaaaatgccgcaaaaaagggaataagggcgacacggaaatgttgaatactcatactcttcctttttcaatattattgaagcatttatcagggttattgtctcatgagcggatacatatttgaatgtatttagaaaaataaacaaataggggttccgcgcacatttccccgaaaagtgccacctgacgcgccctgtagcggcgcattaagcgcggcgggtgtggtggttacgcgcagcgtgaccgctacacttgccagcgccctagcgcccgctcctttcgctttcttcccttcctttctcgccacgttcgccggctttccccgtcaagctctaaatcgggggctccctttagggttccgatttagtgctttacggcacctcgaccccaaaaaacttgattagggtgatggttcacgtagtgggccatcgccctgatagacggtttttcgccctttgacgttggagtccacgttctttaatagtggactcttgttccaaactggaacaacactcaaccctatctcggtctattcttttgatttataagggattttgccgatttcggcctattggttaaaaaatgagctgatttaacaaaaatttaacgcgaattttaacaaaatattaacgtttacaatttcccattcgccattcaggctgcgcaactgttgggaagggcgatcggtgcgggcctcttcgctattacgcca

SEQ ID NO: 165 - DNA, 3843 bp, synthetic construct
  misc_feature 1..3843: note = encodes recombinant coronavirus Spike (S) polypeptide
  source 1..3843: mol_type = other DNA
ggatccgccaccatgtttgtattcttagtattgctgcccctagtgagcagccagtgtgttaatctgacgacgcggacccaacttcctccagcctacacaaactcttttacgcgcggggtctattacccggacaaagtgttccgttcgagtgttttgcatagcacccaggatttattcctaccattcttttcaaatgttacctggttccatgtgattcacgtctccggtactaatggaactaaacggttcgacaaccccgttttgccgttcaacgatggggtgtacttcgcttctattgagaagtcgaatatcatacgtgggtggattttcggcacgaccttggatagtaaaactcagtcgttacttatagtaaataatgctaccaatgttgtgattaaggtgtgtgagttccagttttgtaatgatccctttcttgacgtctattatcataaaaataacaaatcatggatggaatcggagtttcgggtgtattcctctgcgaacaactgtacatttgaatatgtgtctcagccgttcctgatggatttggagggtaagcaaggcaactttaagaatttgcgagagttcgtcttcaagaacatagatggatactttaaaatttatagcaagcacacaccgattaatatagtgcgagaccttcctcaaggtttctcggcccttgagccgctagtggacctgcccattggaattaatatcacccggtttcagactctgcttgcccttcatcgttcttatctgacccctggcgattcttcatcaggatggacggctggggctgccgcctattatgtcggataccttcaaccaaggacttttctcctcaagtataacgagaacggaacaattacagatgcagtcgattgcgccctagaccctctgtcggaaacgaagtgcaccttgaagagttttacagtagagaaggggatttaccagaccagtaacttcagggtccaaccgaccgaatccatcgtccgatttccaaatataactaatttatgtccgtttgacgaggtcttcaacgcaactcggttcgcgtcagtttatgcgtggaaccgcaaaagaataagcaactgcgtagctgactattccgttctctacaactctgcgccgttttttacttttaaatgctatggagtaagtccaacaaaattaaatgatctatgttttacaaatgtgtacgcagactcgtttgtaataaggggtgacgaagttcgtcagatagcaccagggcaaactgggaatattgcagactacaactataagctacccgatgacttcactggctgcgtcatcgcttggaatagtaataaattagatagtaaggtgagtgggaattataattacctatatcgtctctttagaaaaagtaacctcaagccattcgaacgcgacatttctacagaaatctatcaagctggcaataaaccttgcaacggtgtcgcgggcttcaactgctactttccccttaggtcgtactcttttcgacctacctatggtgtgggccaccagccctatagagttgttgtcctatcttttgaactattacatgccccagcgacggtatgcggacccaagaagtcgactaatttagtaaagaacaaatgcgttaattttaattttaatggccttaaagggacaggtgttttaacggaatcgaataaaaaattcttacctttccagcaatttggacgcgacatagctgatacgacggatgcagtcagagaccctcagacactggagatactggacataaccccgtgcagcttcgggggagtctccgtaataacccctgggacgaacacatccaatcaggtagcagtattatatcaaggcgtcaattgtacagaagttcctgtcgctatccatgcagatcaactcaccccgacctggcgcgtttatagcactgggagtaatgtattccaaactcgtgcaggatgtcttatcggggctgaatacgtgaataactcatacgagtgtgacattccaattggagctggcatatgtgccagctatcaaactcaaacgaagtcccaccaacaggcacagtctgtcgcgtctcaatcgatcattgcctatacaatgagtcttggtgccgaaaattcagttgcatatagcaacaactcaatagcgatacctactaatttcacaatcagtgtgaccaccgaaattctcccagtatcgatgacaaagacatccgtggattgtactatgtacatctgtggagactcgacggagtgctccaacttactccttcagtacgggtccttttgcactcaattaaagagggccctaacaggcattgctgttgagcaagacaagaacacgcaagaggtatttgcacaggtgaagcaaatatacaagacaccaccaattaagtactttggaggttttaacttctctcagatactcccagatcccagcaaaccctctaaacggagcttcatagaagacctcttgtttaataaagtgactttagctgatgcaggctttatcaagcaatatggggattgtttgggggatattgccgcccgcgacctcatctgcgcccagaaattcaagggtctaacagtattaccaccgctcctgacagacgagatgatcgctcaatacacttctgcgctgttggccgggacaattacgtctgggtggaccttcggcgcaggtgccgccttgcagatcccatttgcgatgcaaatggcgtatcgttttaacggtataggtgtcacacaaaacgtattatacgaaaaccagaaactaatagctaaccaatttaactcagcaataggaaaaatacaggattctctttcctctacggcgagcgccctcgggaaacttcaggatgtagtgaaccataacgctcaagcacttaataccctggttaagcaactatcaagcaagttcggtgctatctcatcagtgcttaatgacatcttcagtcgactagatcccccggaagcagaagttcaaatcgacagattgataactggccgcttgcaatctctacaaacatacgttacccagcagctgattcgggctgcggaaatccgagcatcggccaacctcgccgcgactaaaatgagcgagtgcgtattgggccagagtaaaagggttgacttctgcggtaagggctaccaccttatgagttttccgcagagtgcgcctcacggagttgtcttcctccacgtgacgtatgtgccggcacaggaaaaaaatttcaccaccgcccctgcgatatgtcatgatggtaaggcgcactttccaagagagggtgtctttgtttcaaatggaacccactggttcgttactcaacgtaatttttacgaacctcagattatcactacggataatacgttcgtgtcaggaaactgcgacgtggtaattggtatagtaaataatactgtgtatgatcccctccagccggagctggactcattcaaagaggaattagataagtacttcaaaaatcacacaagccctgatgtggacttgggagatatctcaggaattaacgcttccgttgtcaacatccaaaaagagatagacaggctgaatgaagtagcgaaaaacctgaacgaatccctgattgacttgcaagagctgggcaaatacgaacagtatattaaatggccctggtatatttggttggggttcatcgctggtttaatcgctattgttatggtcaccattatgctttgttgtatgacgtcctgttgttcttgtctaaagggctgctgttcgtgcggttcctgctgtaaattcgatgaggatgactccgaacccgttctgaaaggcgtcaagctccattatacttaatgaaagctt

SEQ ID NO: 166 - DNA, 3834 bp, synthetic construct
  misc_feature 1..3834: note = encodes recombinant coronavirus Spike (S) polypeptide
  source 1..3834: mol_type = other DNA
ggatccgccaccatgtttgtttttctcgtactacttccactagtatctagccaatgtgtaaatttaaccacgaggacgcagctgcctccggcatatacgaatagtttcactaggggagtctattatccagataaagtgttccgaagcagtgttctacattcaacacaggacctcttccttcctttctttagcaacgtcacgtggttccatgtcataagcggcacaaacggcacaaagcgcttcgataatccggtgcttccgtttaacgatggggtttattttgcttctattgaaaagagcaacattatacgcggttggatcttcggaactacattggatagtaaaacgcaatcattgctaatcgttaataacgcgactaatgtagtgattaaggtgtgcgagttccagttttgcaatgacccctttttggatcataaaaataataaatcgtggatggaatcagaatttcgtgtatattcaagcgcaaacaactgtacgttcgagtacgtgagtcagcccttcttgatggatctggaagggaagcagggcaattttaaaaacttacgtgagtttgtatttaagaatatcgacgggtatttcaagatttactcaaagcacacaccgattattgttcgagagccggaagatttaccccaaggcttctcagcactggaacccttggtagacctacctatcggtattaatataacccgcttccaaaccttgttagcgctgcatcggagttatttaacccccggagactcatcgagcgggtggaccgccggggctgcagcttattacgtggggtatttacaaccacggacgttcttactcaagtacaacgagaacgggacgattactgatgccgtcgactgtgctttggacccgctgagcgaaaccaagtgcacactcaagtctttcacggtagagaaggggatctaccagacatcaaattttcgggtacaaccaacggagtccatcgtacgctttccgaatatcacgaatctttgtccattcgatgaggtattcaatgctacgcgttttgcgagtgtgtacgcgtggaataggaagcgtatctcaaattgcgtcgctgattactccgtactctataacagcgcgcccttctttaccttcaaatgctacggggtttctcctactaaactaaacgatctatgttttacgaacgtctacgcagacagctttgttatacgaggggacgaggttcggcagatcgcccccggccaaacaggaaacatcgccgactataattacaaactcccagatgactttactggttgcgtaattgcgtggaactctaacaagttagactccaaggtctcgggaaactacaattacctgtaccgtctcttcagaaaatctaacttaaagcctttcgagcgagatattagcactgaaatctatcaggcgggtaataaaccctgtaacggggtcgccggttttaactgctactttcctcttcggtcgtattcctttcgcccgacctatggagttggacaccaaccttatagagtcgttgttctaagttttgaattgctccatgccccggcgacggtatgcgggccaaagaaaagtactaatctcgttaagaataaatgtgtgaatttcaactttaacggacttaaaggtacgggcgtattgaccgagtcaaataaaaagtttttacccttccagcaatttggtagggatatcgcggatactactgacgcagtgagagatccacaaacacttgaaatcctagacatcaccccttgtagttttgggggagtgtctgtaatcacccctggtacaaacacttctaaccaagtcgcggttctttatcagggtgttaattgtacagaagtgcctgtcgccattcatgcagaccagctgacgcccacttggcgcgtctactcgacgggatctaatgtctttcagactcgagctggatgcctcatcggggcagaatacgtgaacaactcctatgaatgcgatattcctatcggtgctggcatttgcgcatcttatcaaacacagaccaaaagtcatcagcaagcgcaatccgttgccagtcaatctataattgcgtatacaatgtccttgggcgcggaaaattcagtcgcgtatagcaacaattctatcgctattccaacgaattttactatatcggtcacaacagagatactaccagtgtcgatgactaagacttcggtagattgcacaatgtacatatgcggagacagcacagaatgctcgaacctacttcttcaatatggttctttttgcactcagctcaagagagctcttactggcatagcagtggagcaagataaaaatacccaggaagtgtttgctcaagtaaaacagatatataaaacccctccgatcaaatattttggaggttttaacttctcacaaatactaccggacccttccaaaccatcgaaacggtccttcatagaggacttgctctttaataaggtaactttggcggatgctggttttataaagcagtatggagattgtcttggtgacatagcggccagagacctcatctgtgcacagaaattcaaaggtctaacagtacttccgcccctgctaacggacgagatgatagctcaatacaccagtgcccttctggctggaacgataaccagtggatggaccttcggcgcaggtgccgcactgcagattccgttcgcaatgcagatggcctatcggtttaatgggatcggcgtcactcaaaatgtattgtacgaaaatcagaaactcattgccaaccaattcaattcagcgataggcaagatccaggacagtctctcttccaccgcctccgccttaggtaagctacaagatgttgttaatcataacgctcaagcattgaatacgctggtaaaacaattgagcagcaaattcggcgcaattagctcagttttgaacgacatattctcccgacttgacccccccgaagctgaagtccaaatagataggctgataaccgggaggctacagtcactccaaacctacgtgactcaacagctcataagagcagccgaaataagagcctctgctaatctcgccgcgactaagatgtcagagtgtgttttaggtcaaagtaaaagggttgatttctgtggtaagggataccaccttatgtcctttccacaatcggctccacacggtgtggtctttctgcacgttacttatgtcccggctcaggagaagaatttcaccacagccccggctatttgtcatgacggcaaggcgcacttccccagagaaggcgtattcgtcagtaacggcactcactggttcgttactcaacgtaacttctacgaacctcagattataacgacagacaacacatttgtatcagggaactgtgatgtggtgatcggtatagtgaacaacacagtgtacgacccattacagccggagttagattctttcaaggaagagctggataagtacttcaagaatcacacctcgccagatgttgaccttggtgatatttcaggtataaacgcctctgtcgtgaatatccagaaagagatcgaccgtctcaacgaagtagcgaaaaatctaaacgaatcgttaattgaccttcaggagctggggaagtatgagcagtacattaagtggccctggtacatttggctgggctttattgcaggactgatagcaatagtgatggtcaccattatgttgtgctgcatgacatcctgctgctcttgtttaaaagggtgttgtagttgtggatcgtgttgcaagttcgacgaggatgattccgaacctgttctgaaaggcgtaaaattacactacacataatgaaagctt

SEQ ID NO: 167 - protein, 1273 aa, synthetic construct
  REGION 1..1273: note = recombinant coronavirus Spike (S) polypeptide
MFVFLVLLPLVSSQCVNLTTRTQLPPAYTNSFTRGVYYPDKVFRSSVLHSTQDLFLPFFSNVTWFHVIHVSGTNGTKRFDNPVLPFNDGVYFASIEKSNIIRGWIFGTTLDSKTQSLLIVNNATNVVIKVCEFQFCNDPFLDVYYHKNNKSWMESEFRVYSSANNCTFEYVSQPFLMDLEGKQGNFKNLREFVFKNIDGYFKIYSKHTPINIVRDLPQGFSALEPLVDLPIGINITRFQTLLALHRSYLTPGDSSSGWTAGAAAYYVGYLQPRTFLLKYNENGTITDAVDCALDPLSETKCTLKSFTVEKGIYQTSNFRVQPTESIVRFPNITNLCPFDEVFNATRFASVYAWNRKRISNCVADYSVLYNSAPFFTFKCYGVSPTKLNDLCFTNVYADSFVIRGDEVRQIAPGQTGNIADYNYKLPDDFTGCVIAWNSNKLDSKVSGNYNYLYRLFRKSNLKPFERDISTEIYQAGNKPCNGVAGFNCYFPLRSYSFRPTYGVGHQPYRVVVLSFELLHAPATVCGPKKSTNLVKNKCVNFNFNGLKGTGVLTESNKKFLPFQQFGRDIADTTDAVRDPQTLEILDITPCSFGGVSVITPGTNTSNQVAVLYQGVNCTEVPVAIHADQLTPTWRVYSTGSNVFQTRAGCLIGAEYVNNSYECDIPIGAGICASYQTQTKSHQQAQSVASQSIIAYTMSLGAENSVAYSNNSIAIPTNFTISVTTEILPVSMTKTSVDCTMYICGDSTECSNLLLQYGSFCTQLKRALTGIAVEQDKNTQEVFAQVKQIYKTPPIKYFGGFNFSQILPDPSKPSKRSFIEDLLFNKVTLADAGFIKQYGDCLGDIAARDLICAQKFKGLTVLPPLLTDEMIAQYTSALLAGTITSGWTFGAGAALQIPFAMQMAYRFNGIGVTQNVLYENQKLIANQFNSAIGKIQDSLSSTASALGKLQDVVNHNAQALNTLVKQLSSKFGAISSVLNDIFSRLDPPEAEVQIDRLITGRLQSLQTYVTQQLIRAAEIRASANLAATKMSECVLGQSKRVDFCGKGYHLMSFPQSAPHGVVFLHVTYVPAQEKNFTTAPAICHDGKAHFPREGVFVSNGTHWFVTQRNFYEPQIITTDNTFVSGNCDVVIGIVNNTVYDPLQPELDSFKEELDKYFKNHTSPDVDLGDISGINASVVNIQKEIDRLNEVAKNLNESLIDLQELGKYEQYIKWPWYIWLGFIAGLIAIVMVTIMLCCMTSCCSCLKGCCSCGSCCKFDEDDSEPVLKGVKLHYT

SEQ ID NO: 168 - DNA, 3843 bp, synthetic construct
  misc_feature 1..3843: note = encodes recombinant coronavirus Spike (S) polypeptide
  source 1..3843: mol_type = other DNA
ggatccgccaccatgtttgtattcttagtattgctgcccctagtgagcagccagtgtgttaatctgacgacgcggacccaacttcctccagcctacacaaactcttttacgcgcggggtctattacccggacaaagtgttccgttcgagtgttttgcatagcacccaggatttattcctaccattcttttcaaatgttacctggttccatgtgattcacgtctccggtactaatggaactaaacggttcgacaaccccgttttgccgttcaacgatggggtgtacttcgcttctattgagaagtcgaatatcatacgtgggtggattttcggcacgaccttggatagtaaaactcagtcgttacttatagtaaataatgctaccaatgttgtgattaaggtgtgtgagttccagttttgtaatgatccctttcttgacgtctattatcataaaaataacaaatcatggatggaatcggagtttcgggtgtattcctctgcgaacaactgtacatttgaatatgtgtctcagccgttcctgatggatttggagggtaagcaaggcaactttaagaatttgcgagagttcgtcttcaagaacatagatggatactttaaaatttatagcaagcacacaccgattaatatagtgcgagaccttcctcaaggtttctcggcccttgagccgctagtggacctgcccattggaattaatatcacccggtttcagactctgcttgcccttcatcgttcttatctgacccctggcgattcttcatcaggatggacggctggggctgccgcctattatgtcggataccttcaaccaaggacttttctcctcaagtataacgagaacggaacaattacagatgcagtcgattgcgccctagaccctctgtcggaaacgaagtgcaccttgaagagttttacagtagagaaggggatttaccagaccagtaacttcagggtccaaccgaccgaatccatcgtccgatttccaaatataactaatttatgtccgtttgacgaggtcttcaacgcaactcggttcgcgtcagtttatgcgtggaaccgcaaaagaataagcaactgcgtagctgactattccgttctctacaactctgcgccgttttttacttttaaatgctatggagtaagtccaacaaaattaaatgatctatgttttacaaatgtgtacgcagactcgtttgtaataaggggtgacgaagttcgtcagatagcaccagggcaaactgggaatattgcagactacaactataagctacccgatgacttcactggctgcgtcatcgcttggaatagtaataaattagatagtaaggtgagtgggaattataattacctatatcgtctctttagaaaaagtaacctcaagccattcgaacgcgacatttctacagaaatctatcaagctggcaataaaccttgcaacggtgtcgcgggcttcaactgctactttccccttaggtcgtactcttttcgacctacctatggtgtgggccaccagccctatagagttgttgtcctatcttttgaactattacatgccccagcgacggtatgcggacccaagaagtcgactaatttagtaaagaacaaatgcgttaattttaattttaatggccttaaagggacaggtgttttaacggaatcgaataaaaaattcttacctttccagcaatttggacgcgacatagctgatacgacggatgcagtcagagaccctcagacactggagatactggacataaccccgtgcagcttcgggggagtctccgtaataacccctgggacgaacacatccaatcaggtagcagtattatatcaaggcgtcaattgtacagaagttcctgtcgctatccatgcagatcaactcaccccgacctggcgcgtttatagcactgggagtaatgtattccaaactcgtgcaggatgtcttatcggggctgaatacgtgaataactcatacgagtgtgacattccaattggagctggcatatgtgccagctatcaaactcaaacgaagtcccaccaacaggcacagtctgtcgcgtctcaatcgatcattgcctatacaatgagtcttggtgccgaaaattcagttgcatatagcaacaactcaatagcgatacctactaatttcacaatcagtgtgaccaccgaaattctcccagtatcgatgacaaagacatccgtggattgtactatgtacatctgtggagactcgacggagtgctccaacttactccttcagtacgggtccttttgcactcaattaaagagggccctaacaggcattgctgttgagcaagacaagaacacgcaagaggtatttgcacaggtgaagcaaatatacaagacaccaccaattaagtactttggaggttttaacttctctcagatactcccagatcccagcaaaccctctaaacggagcttcatagaagacctcttgtttaataaagtgactttagctgatgcaggctttatcaagcaatatggggattgtttgggggatattgccgcccgcgacctcatctgcgcccagaaattcaagggtctaacagtattaccaccgctcctgacagacgagatgatcgctcaatacacttctgcgctgttggccgggacaattacgtctgggtggaccttcggcgcaggtgccgccttgcagatcccatttgcgatgcaaatggcgtatcgttttaacggtataggtgtcacacaaaacgtattatacgaaaaccagaaactaatagctaaccaatttaactcagcaataggaaaaatacaggattctctttcctctacggcgagcgccctcgggaaacttcaggatgtagtgaaccataacgctcaagcacttaataccctggttaagcaactatcaagcaagttcggtgctatctcatcagtgcttaatgacatcttcagtcgactagatcccccggaagcagaagttcaaatcgacagattgataactggccgcttgcaatctctacaaacatacgttacccagcagctgattcgggctgcggaaatccgagcatcggccaacctcgccgcgactaaaatgagcgagtgcgtattgggccagagtaaaagggttgacttctgcggtaagggctaccaccttatgagttttccgcagagtgcgcctcacggagttgtcttcctccacgtgacgtatgtgccggcacaggaaaaaaatttcaccaccgcccctgcgatatgtcatgatggtaaggcgcactttccaagagagggtgtctttgtttcaaatggaacccactggttcgttactcaacgtaatttttacgaacctcagattatcactacggataatacgttcgtgtcaggaaactgcgacgtggtaattggtatagtaaataatactgtgtatgatcccctccagccggagctggactcattcaaagaggaattagataagtacttcaaaaatcacacaagccctgatgtggacttgggagatatctcaggaattaacgcttccgttgtcaacatccaaaaagagatagacaggctgaatgaagtagcgaaaaacctgaacgaatccctgattgacttgcaagagctgggcaaatacgaacagtatattaaatggccctggtatatttggttggggttcatcgctggtttaatcgctattgttatggtcaccattatgctttgttgtatgacgtcctgttgttcttgtctaaagggctgctgttcgtgcggttcctgctgtaaattcgatgaggatgactccgaacccgttctgaaaggcgtcaagctccattatacttaatgaaagtcc

SEQ ID NO: 169 - DNA, 3819 bp, synthetic construct; identical to SEQ ID NO: 161
  misc_feature 1..3819: note = encodes recombinant coronavirus Spike (S) polypeptide
  source 1..3819: mol_type = other DNA

SEQ ID NO: 170 - protein, 1270 aa, synthetic construct
  REGION 1..1270: note = recombinant coronavirus Spike (S) polypeptide
MFVFLVLLPLVSSQCVNLTTRTQLPPAYTNSFTRGVYYPDKVFRSSVLHSTQDLFLPFFSNVTWFHVISGTNGTKRFDNPVLPFNDGVYFASIEKSNIIRGWIFGTTLDSKTQSLLIVNNATNVVIKVCEFQFCNDPFLDHKNNKSWMESEFRVYSSANNCTFEYVSQPFLMDLEGKQGNFKNLREFVFKNIDGYFKIYSKHTPIIVREPEDLPQGFSALEPLVDLPIGINITRFQTLLALHRSYLTPGDSSSGWTAGAAAYYVGYLQPRTFLLKYNENGTITDAVDCALDPLSETKCTLKSFTVEKGIYQTSNFRVQPTESIVRFPNITNLCPFDEVFNATRFASVYAWNRKRISNCVADYSVLYNSAPFFTFKCYGVSPTKLNDLCFTNVYADSFVIRGDEVRQIAPGQTGNIADYNYKLPDDFTGCVIAWNSNKLDSKVSGNYNYLYRLFRKSNLKPFERDISTEIYQAGNKPCNGVAGFNCYFPLRSYSFRPTYGVGHQPYRVVVLSFELLHAPATVCGPKKSTNLVKNKCVNFNFNGLKGTGVLTESNKKFLPFQQFGRDIADTTDAVRDPQTLEILDITPCSFGGVSVITPGTNTSNQVAVLYQGVNCTEVPVAIHADQLTPTWRVYSTGSNVFQTRAGCLIGAEYVNNSYECDIPIGAGICASYQTQTKSHQQAQSVASQSIIAYTMSLGAENSVAYSNNSIAIPTNFTISVTTEILPVSMTKTSVDCTMYICGDSTECSNLLLQYGSFCTQLKRALTGIAVEQDKNTQEVFAQVKQIYKTPPIKYFGGFNFSQILPDPSKPSKRSFIEDLLFNKVTLADAGFIKQYGDCLGDIAARDLICAQKFKGLTVLPPLLTDEMIAQYTSALLAGTITSGWTFGAGAALQIPFAMQMAYRFNGIGVTQNVLYENQKLIANQFNSAIGKIQDSLSSTASALGKLQDVVNHNAQALNTLVKQLSSKFGAISSVLNDIFSRLDPPEAEVQIDRLITGRLQSLQTYVTQQLIRAAEIRASANLAATKMSECVLGQSKRVDFCGKGYHLMSFPQSAPHGVVFLHVTYVPAQEKNFTTAPAICHDGKAHFPREGVFVSNGTHWFVTQRNFYEPQIITTDNTFVSGNCDVVIGIVNNTVYDPLQPELDSFKEELDKYFKNHTSPDVDLGDISGINASVVNIQKEIDRLNEVAKNLNESLIDLQELGKYEQYIKWPWYIWLGFIAGLIAIVMVTIMLCCMTSCCSCLKGCCSCGSCCKFDEDDSEPVLKGVKLHYT

SEQ ID NO: 171 - DNA, 3834 bp, synthetic construct
  misc_feature 1..3834: note = encodes recombinant coronavirus Spike (S) polypeptide
  source 1..3834: mol_type = other DNA
ggatccgccaccatgtttgtttttctcgtactacttccactagtatctagccaatgtgtaaatttaaccacgaggacgcagctgcctccggcatatacgaatagtttcactaggggagtctattatccagataaagtgttccgaagcagtgttctacattcaacacaggacctcttccttcctttctttagcaacgtcacgtggttccatgtcataagcggcacaaacggcacaaagcgcttcgataatccggtgcttccgtttaacgatggggtttattttgcttctattgaaaagagcaacattatacgcggttggatcttcggaactacattggatagtaaaacgcaatcattgctaatcgttaataacgcgactaatgtagtgattaaggtgtgcgagttccagttttgcaatgacccctttttggatcataaaaataataaatcgtggatggaatcagaatttcgtgtatattcaagcgcaaacaactgtacgttcgagtacgtgagtcagcccttcttgatggatctggaagggaagcagggcaattttaaaaacttacgtgagtttgtatttaagaatatcgacgggtatttcaagatttactcaaagcacacaccgattattgttcgagagccggaagatttaccccaaggcttctcagcactggaacccttggtagacctacctatcggtattaatataacccgcttccaaaccttgttagcgctgcatcggagttatttaacccccggagactcatcgagcgggtggaccgccggggctgcagcttattacgtggggtatttacaaccacggacgttcttactcaagtacaacgagaacgggacgattactgatgccgtcgactgtgctttggacccgctgagcgaaaccaagtgcacactcaagtctttcacggtagagaaggggatctaccagacatcaaattttcgggtacaaccaacggagtccatcgtacgctttccgaatatcacgaatctttgtccattcgatgaggtattcaatgctacgcgttttgcgagtgtgtacgcgtggaataggaagcgtatctcaaattgcgtcgctgattactccgtactctataacagcgcgcccttctttaccttcaaatgctacggggtttctcctactaaactaaacgatctatgttttacgaacgtctacgcagacagctttgttatacgaggggacgaggttcggcagatcgcccccggccaaacaggaaacatcgccgactataattacaaactcccagatgactttactggttgcgtaattgcgtggaactctaacaagttagactccaaggtctcgggaaactacaattacctgtaccgtctcttcagaaaatctaacttaaagcctttcgagcgagatattagcactgaaatctatcaggcgggtaataaaccctgtaacggggtcgccggttttaactgctactttcctcttcggtcgtattcctttcgcccgacctatggagttggacaccaaccttatagagtcgttgttctaagttttgaattgctccatgccccggcgacggtatgcgggccaaagaaaagtactaatctcgttaagaataaatgtgtgaatttcaactttaacggacttaaaggtacgggcgtattgaccgagtcaaataaaaagtttttacccttccagcaatttggtagggatatcgcggatactactgacgcagtgagagatccacaaacacttgaaatcctagacatcaccccttgtagttttgggggagtgtctgtaatcacccctggtacaaacacttctaaccaagtcgcggttctttatcagggtgttaattgtacagaagtgcctgtcgccattcatgcagaccagctgacgcccacttggcgcgtctactcgacgggatctaatgtctttcagactcgagctggatgcctcatcggggcagaatacgtgaacaactcctatgaatgcgatattcctatcggtgctggcatttgcgcatcttatcaaacacagaccaaaagtcatcagcaagcgcaatccgttgccagtcaatctataattgcgtatacaatgtccttgggcgcggaaaattcagtcgcgtatagcaacaattctatcgctattccaacgaattttactatatcggtcacaacagagatactaccagtgtcgatgactaagacttcggtagattgcacaatgtacatatgcggagacagcacagaatgctcgaacctacttcttcaatatggttctttttgcactcagctcaagagagctcttactggcatagcagtggagcaagataaaaatacccaggaagtgtttgctcaagtaaaacagatatataaaacccctccgatcaaatattttggaggttttaacttctcacaaatactaccggacccttccaaaccatcgaaacggtccttcatagaggacttgctctttaataaggtaactttggcggatgctggttttataaagcagtatggagattgtcttggtgacatagcggccagagacctcatctgtgcacagaaattcaaaggtctaacagtacttccgcccctgctaacggacgagatgatagctcaatacaccagtgcccttctggctggaacgataaccagtggatggaccttcggcgcaggtgccgcactgcagattccgttcgcaatgcagatggcctatcggtttaatgggatcggcgtcactcaaaatgtattgtacgaaaatcagaaactcattgccaaccaattcaattcagcgataggcaagatccaggacagtctctcttccaccgcctccgccttaggtaagctacaagatgttgttaatcataacgctcaagcattgaatacgctggtaaaacaattgagcagcaaattcggcgcaattagctcagttttgaacgacatattctcccgacttgacccccccgaagctgaagtccaaatagataggctgataaccgggaggctacagtcactccaaacctacgtgactcaacagctcataagagcagccgaaataagagcctctgctaatctcgccgcgactaagatgtcagagtgtgttttaggtcaaagtaaaagggttgatttctgtggtaagggataccaccttatgtcctttccacaatcggctccacacggtgtggtctttctgcacgttacttatgtcccggctcaggagaagaatttcaccacagccccggctatttgtcatgacggcaaggcgcacttccccagagaaggcgtattcgtcagtaacggcactcactggttcgttactcaacgtaacttctacgaacctcagattataacgacagacaacacatttgtatcagggaactgtgatgtggtgatcggtatagtgaacaacacagtgtacgacccattacagccggagttagattctttcaaggaagagctggataagtacttcaagaatcacacctcgccagatgttgaccttggtgatatttcaggtataaacgcctctgtcgtgaatatccagaaagagatcgaccgtctcaacgaagtagcgaaaaatctaaacgaatcgttaattgaccttcaggagctggggaagtatgagcagtacattaagtggccctggtacatttggctgggctttattgcaggactgatagcaatagtgatggtcaccattatgttgtgctgcatgacatcctgctgctcttgtttaaaagggtgttgtagttgtggatcgtgttgcaagttcgacgaggatgattccgaacctgttctgaaaggcgtaaaattacactacacataatgaaagtcc

SEQ ID NO: 172 - DNA, 3810 bp, synthetic construct; identical to SEQ ID NO: 162
  misc_feature 1..3810: note = encodes recombinant coronavirus Spike (S) polypeptide
  source 1..3810: mol_type = other DNA

SEQ ID NO: 173 - protein, 1271 aa, synthetic construct
  REGION 1..1271: note = recombinant coronavirus Spike (S) polypeptide
MFVFLVLLPLVSSQCVNLRTRTQLPPAYTNSFTRGVYYPDKVFRSSVLHSTQDLFLPFFSNVTWFHAIHVSGTNGTKRFDNPVLPFNDGVYFASTEKSNIIRGWIFGTTLDSKTQSLLIVNNATNVVIKVCEFQFCNDPFLDVYYHKNNKSWMESGVYSSANNCTFEYVSQPFLMDLEGKQGNFKNLREFVFKNIDGYFKIYSKHTPINLVRDLPQGFSALEPLVDLPIGINITRFQTLLALHRSYLTPGDSSSGWTAGAAAYYVGYLQPRTFLLKYNENGTITDAVDCALDPLSETKCTLKSFTVEKGIYQTSNFRVQPTESIVRFPNITNLCPFGEVFNATRFASVYAWNRKRISNCVADYSVLYNSASFSTFKCYGVSPTKLNDLCFTNVYADSFVIRGDEVRQIAPGQTGKIADYNYKLPDDFTGCVIAWNSNNLDSKVGGNYNYRYRLFRKSNLKPFERDISTEIYQAGSKPCNGVEGFNCYFPLQSYGFQPTNGVGYQPYRVVVLSFELLHAPATVCGPKKSTNLVKNKCVNFNFNGLTGTGVLTESNKKFLPFQQFGRDIADTTDAVRDPQTLEILDITPCSFGGVSVITPGTNTSNQVAVLYQGVNCTEVPVAIHADQLTPTWRVYSTGSNVFQTRAGCLIGAEHVNNSYECDIPIGAGICASYQTQTNSRQQAQSVASQSIIAYTMSLGAENSVAYSNNSIAIPTNFTISVTTEILPVSMTKTSVDCTMYICGDSTECSNLLLQYGSFCTQLNRALTGIAVEQDKNTQEVFAQVKQIYKTPPIKDFGGFNFSQILPDPSKPSKRSFIEDLLFNKVTLADAGFIKQYGDCLGDIAARDLICAQKFNGLTVLPPLLTDEMIAQYTSALLAGTITSGWTFGAGAALQIPFAMQMAYRFNGIGVTQNVLYENQKLIANQFNSAIGKIQDSLSSTASALGKLQNVVNQNAQALNTLVKQLSSNFGAISSVLNDILSRLDPPEAEVQIDRLITGRLQSLQTYVTQQLIRAAEIRASANLAATKMSECVLGQSKRVDFCGKGYHLMSFPQSAPHGVVFLHVTYVPAQEKNFTTAPAICHDGKAHFPREGVFVSNGTHWFVTQRNFYEPQIITTDNTFVSGNCDVVIGIVNNTVYDPLQPELDSFKEELDKYFKNHTSPDVDLGDISGINASVVNIQKEIDRLNEVAKNLNESLIDLQELGKYEQYIKWPWYIWLGFIAGLIAIVMVTIMLCCMTSCCSCLKGCCSCGSCCKFDEDDSEPVLKGVKLHYT

SEQ ID NO: 174 - protein, 1258 aa, synthetic construct
  REGION 1..1258: note = recombinant coronavirus Spike (S) polypeptide
QCVNLTTRTQLPPAYTNSFTRGVYYPDKVFRSSVLHSTQDLFLPFFSNVTWFHVIHVSGTNGTKRFDNPVLPFNDGVYFASIEKSNIIRGWIFGTTLDSKTQSLLIVNNATNVVIKVCEFQFCNDPFLDVYYHKNNKSWMESEFRVYSSANNCTFEYVSQPFLMDLEGKQGNFKNLREFVFKNIDGYFKIYSKHTPINIVRDLPQGFSALEPLVDLPIGINITRFQTLLALHRSYLPGDSSSGWTAGAAAYYVGYLQPRTFLLKYNENGTITDAVDCALDPLSETKCTLKSFTVEKGIYQTSNFRVQPTESIVRFPNITNLCPFDEVFNATRFASVYAWNRKRISNCVADYSVLYNLAPFFTFKCYGVSPTKLNDLCFTNVYADSFVIRGDEVRQIAPGQTGNIADYNYKLPDDFTGCVIAWNSNKLDSKVSGNYNYLYRLFRKSNLKPFERDISTEIYQAGNKPCNGVAGFNCYFPLRSYSFRPTYGVGHQPYRVVVLSFELLHAPATVCGPKKSTNLVKNKCVNFNFNGLKGTGVLTESNKKFLPFQQFGRDIADTTDAVRDPQTLEILDITPCSFGGVSVITPGTNTSNQVAVLYQGVNCTEVPVAIHADQLTPTWRVYSTGSNVFQTRAGCLIGAEYVNNSYECDIPIGAGICASYQTQTKSHQQAQSVASQSIIAYTMSLGAENSVAYSNNSIAIPTNFTISVTTEILPVSMTKTSVDCTMYICGDSTECSNLLLQYGSFCTQLKRALTGIAVEQDKNTQEVFAQVKQIYKTPPIKYFGGFNFSQILPDPSKPSKRSFIEDLLFNKVTLADAGFIKQYGDCLGDIAARDLICAQKFKGLTVLPPLLTDEMIAQYTSALLAGTITSGWTFGAGAALQIPFAMQMAYRFNGIGVTQNVLYENQKLIANQFNSAIGKIQDSLSSTASALGKLQDVVNHNAQALNTLVKQLSSKFGAISSVLNDIFSRLDPPEAEVQIDRLITGRLQSLQTYVTQQLIRAAEIRASANLAATKMSECVLGQSKRVDFCGKGYHLMSFPQSAPHGVVFLHVTYVPAQEKNFTTAPAICHDGKAHFPREGVFVSNGTHWFVTQRNFYEPQIITTDNTFVSGNCDVVIGIVNNTVYDPLQPELDSFKELDKYFKNHTSPDVDLGDISGINASVVNIQKEIDRLNEVAKNLNESLIDLQELGKYEQYIKWPWYIWLGFIAGLIAIVMVTIMLCCMTSCCSCLKGCCSCGSCCKFDEDDSEPVLKGVKLHYT

SEQ ID NO: 175 - protein, 1257 aa, synthetic construct
  REGION 1..1257: note = recombinant coronavirus Spike (S) polypeptide
QCVNLTTRTQLPPAYTNSFTRGVYYPDKVFRSSVLHSTQDLFLPFFSNVTWFHVISGTNGTKRFDNPVLPFNDGVYFASIEKSNIIRGWIFGTTLDSKTQSLLIVNNATNVVIKVCEFQFCNDPFLDHKNNKSWMESEFRVYSSANNCTFEYVSQPFLMDLEGKQGNFKNLREFVFKNIDGYFKIYSKHTPIIVREPEDLPQGFSALEPLVDLPIGINITRFQTLLALHRSYLTPGDSSSGWTAGAAAYYVGYLQPRTFLLKYNENGTITDAVDCALDPLSETKCTLKSFTVEKGIYQTSNFRVQPTESIVRFPNITNLCPFDEVFNATRFASVYAWNRKRISNCVADYSVLYNLAPFFTFKCYGVSPTKLNDLCFTNVYADSFVIRGDEVRQIAPGQTGNIADYNYKLPDDFTGCVIAWNSNKLDSKVSGNYNYLYRLFRKSNLKPFERDISTEIYQAGNKPCNGVAGFNCYFPLRSYSFRPTYGVGHQPYRVVVLSFELLHAPATVCGPKKSTNLVKNKCVNFNFNGLKGTGVLTESNKKFLPFQQFGRDIADTTDAVRDPQTLEILDITPCSFGGVSVITPGTNTSNQVAVLYQGVNCTEVPVAIHADQLTPTWRVYSTGSNVFQTRAGCLIGAEYVNNSYECDIPIGAGICASYQTQTKSHQQAQSVASQSIIAYTMSLGAENSVAYSNNSIAIPTNFTISVTTEILPVSMTKTSVDCTMYICGDSTECSNLLLQYGSFCTQLKRALTGIAVEQDKNTQEVFAQVKQIYKTPPIKYFGGFNFSQILPDPSKPSKRSFIEDLLFNKVTLADAGFIKQYGDCLGDIAARDLICAQKFKGLTVLPPLLTDEMIAQYTSALLAGTITSGWTFGAGAALQIPFAMQMAYRFNGIGVTQNVLYENQKLIANQFNSAIGKIQDSLSSTASALGKLQDVVNHNAQALNTLVKQLSSKFGAISSVLNDIFSRLDPPEAEVQIDRLITGRLQSLQTYVTQQLIRAAEIRASANLAATKMSECVLGQSKRVDFCGKGYHLMSFPQSAPHGVVFLHVTYVPAQEKNFTTAPAICHDGKAHFPREGVFVSNGTHWFVTQRNFYEPQIITTDNTFVSGNCDVVIGIVNNTVYDPLQPELDSFKEELDKYFKNHTSPDVDLGDISGINASVVNIQKEIDRLNEVAKNLNESLIDLQELGKYEQYIKWPWYIWLGFIAGLIAIVMVTIMLCCMTSCCSCLKGCCSCGSCCKFDEDDSEPVLKGVKLHYT

SEQ ID NO: 176 - protein, 1258 aa, synthetic construct
  REGION 1..1258: note = recombinant coronavirus Spike (S) polypeptide
QCVNLRTRTQLPPAYTNSFTRGVYYPDKVFRSSVLHSTQDLFLPFFSNVTWFHAIHVSGTNGTKRFDNPVLPFNDGVYFASTEKSNIIRGWIFGTTLDSKTQSLLIVNNATNVVIKVCEFQFCNDPFLDVYYHKNNKSWMESGVYSSANNCTFEYVSQPFLMDLEGKQGNFKNLREFVFKNIDGYFKIYSKHTPINLVRDLPQGFSALEPLVDLPIGINITRFQTLLALHRSYLTPGDSSSGWTAGAAAYYVGYLQPRTFLLKYNENGTITDAVDCALDPLSETKCTLKSFTVEKGIYQTSNFRVQPTESIVRFPNITNLCPFGEVFNATRFASVYAWNRKRISNCVADYSVLYNSASFSTFKCYGVSPTKLNDLCFTNVYADSFVIRGDEVRQIAPGQTGKIADYNYKLPDDFTGCVIAWNSNNLDSKVGGNYNYRYRLFRKSNLKPFERDISTEIYQAGSKPCNGVEGFNCYFPLQSYGFQPTNGVGYQPYRVVVLSFELLHAPATVCGPKKSTNLVKNKCVNFNFNGLTGTGVLTESNKKFLPFQQFGRDIADTTDAVRDPQTLEILDITPCSFGGVSVITPGTNTSNQVAVLYQGVNCTEVPVAIHADQLTPTWRVYSTGSNVFQTRAGCLIGAEHVNNSYECDIPIGAGICASYQTQTNSRQQAQSVASQSIIAYTMSLGAENSVAYSNNSIAIPTNFTISVTTEILPVSMTKTSVDCTMYICGDSTECSNLLLQYGSFCTQLNRALTGIAVEQDKNTQEVFAQVKQIYKTPPIKDFGGFNFSQILPDPSKPSKRSFIEDLLFNKVTLADAGFIKQYGDCLGDIAARDLICAQKFNGLTVLPPLLTDEMIAQYTSALLAGTITSGWTFGAGAALQIPFAMQMAYRFNGIGVTQNVLYENQKLIANQFNSAIGKIQDSLSSTASALGKLQNVVNQNAQALNTLVKQLSSNFGAISSVLNDILSRLDPPEAEVQIDRLITGRLQSLQTYVTQQLIRAAEIRASANLAATKMSECVLGQSKRVDFCGKGYHLMSFPQSAPHGVVFLHVTYVPAQEKNFTTAPAICHDGKAHFPREGVFVSNGTHWFVTQRNFYEPQIITTDNTFVSGNCDVVIGIVNNTVYDPLQPELDSFKEELDKYFKNHTSPDVDLGDISGINASVVNIQKEIDRLNEVAKNLNESLIDLQELGKYEQYIKWPWYIWLGFIAGLIAIVMVTIMLCCMTSCCSCLKGCCSCGSCCKFDEDDSEPVLKGVKLHYT

SEQ ID NO: 177 - protein, 1273 aa, synthetic construct
  REGION 1..1273: note = Recombinant SARS-CoV-2 S Polypeptide
MFVFLVLLPLVSSQCVNLTTRTQLPPAYTNSFTRGVYYPDKVFRSSVLHSTQDLFLPFFSNVTWFHAIHVSGTNGTKRFDNPVLPFNDGVYFASIEKSNIIRGWIFGTTLDSKTQSLLIVNNATNVVIKVCEFQFCNDPFLDVYYHKNNKSWMKSEFRVYSSANNCTFEYVSQPFLMDLEGKQGNFKNLREFVFKNIDGYFKIYSKHTPINLVRDLPQGFSALEPLVDLPIGINITRFQTLLALHRSYLTPGDSSSGWTAGAAAYYVGYLQPRTFLLKYNENGTITDAVDCALDPLSETKCTLKSFTVEKGIYQTSNFRVQPTESIVRFPNITNLCPFGEVFNATRFASVYAWNRKRISNCVADYSVLYNSASFSTFKCYGVSPTKLNDLCFTNVYADSFVIRGDEVRQIAPGQTGKIADYNYKLPDDFTGCVIAWNSNNLDSKVGGNYNYRYRLFRKSNLKPFERDISTEIYQAGSTPCNGVQGFNCYFPLQSYGFQPTNGVGYQPYRVVVLSFELLHAPATVCGPKKSTNLVKNKCVNFNFNGLTGTGVLTESNKKFLPFQQFGRDIADTTDAVRDPQTLEILDITPCSFGGVSVITPGTNTSNQVAVLYQGVNCTEVPVAIHADQLTPTWRVYSTGSNVFQTRAGCLIGAEHVNNSYECDIPIGAGICASYQTQTNSRQQAQSVASQSIIAYTMSLGAENSVAYSNNSIAIPTNFTISVTTEILPVSMTKTSVDCTMYICGDSTECSNLLLQYGSFCTQLNRALTGIAVEQDKNTQEVFAQVKQIYKTPPIKDFGGFNFSQILPDPSKPSKRSFIEDLLFNKVTLADAGFIKQYGDCLGDIAARDLICAQKFNGLTVLPPLLTDEMIAQYTSALLAGTITSGWTFGAGAALQIPFAMQMAYRFNGIGVTQNVLYENQKLIANQFNSAIGKIQDSLSSTASALGKLQDVVNQNAQALNTLVKQLSSNFGAISSVLNDILSRLDPPEAEVQIDRLITGRLQSLQTYVTQQLIRAAEIRASANLAATKMSECVLGQSKRVDFCGKGYHLMSFPQSAPHGVVFLHVTYVPAHEKNFTTAPAICHDGKAHFPREGVFVSNGTHWFVTQRNFYEPQIITTDNTFVSGNCDVVIGIVNNTVYDPLQPELDSFKEELDKYFKNHTSPDVDLGDISGINASVVNIQKEIDRLNEVAKNLNESLIDLQELGKYEQYIKWPWYIWLGFIAGLIAIVMVTIMLCCMTSCCSCLKGCCSCGSCCKFDEDDSEPVLKGVKLHYT

SEQ ID NO: 178 - protein, 1271 aa, synthetic construct
  REGION 1..1271: note = Recombinant SARS-CoV-2 S Polypeptide
MFVFLVLLPLVSSQCVNLRTRTQLPPAYTNSFTRGVYYPDKVFRSSVLHSTQDLFLPFFSNVTWFHAIHVSGTNGTKRFDNPVLPFNDGVYFASTEKSNIIRGWIFGTTLDSKTQSLLIVNNATNVVIKVCEFQFCNDPFLDVYYHKNNKSWMESGVYSSANNCTFEYVSQPFLMDLEGKQGNFKNLREFVFKNIDGYFKIYSKHTPINLVRDLPQGFSALEPLVDLPIGINITRFQTLLALHRSYLTPGDSSSGITAGAAAYYVGYLQPRTFLLKYNENGTITDAVDCALDPLSETKCTLKSFTVEKGIYQTSNFRVQPTESIVRFPNITNLCPFGEVFNATRFASVYAWNRKRISNCVADYSVLYNSASFSTFKCYGVSPTKLNDLCFTNVYADSFVIRGDEVRQIAPGQTGNIADYNYKLPDDFTGCVIAWNSNNLDSKVGGNYNYRYRLFRKSNLKPFERDISTEIYQAGSKPCNGVEGFNCYFPLQSYGFQPTNGVGYQPYRVVVLSFELLHAPATVCGPKKSTNLVKNKCVNFNFNGLTGTGVLTESNKKFLPFQQFGRDIADTTDAVRDPQTLEILDITPCSFGGVSVITPGTNTSNQVAVLYQGVNCTEVPVAIHADQLTPTWRVYSTGSNVFQTRAGCLIGAEHVNNSYECDIPIGAGICASYQTQTNSRQQAQSVASQSIIAYTMSLGAENSVAYSNNSIAIPTNFTISVTTEILPVSMTKTSVDCTMYICGDSTECSNLLLQYGSFCTQLNRALTGIAVEQDKNTQEVFAQVKQIYKTPPIKDFGGFNFSQILPDPSKPSKRSFIEDLLFNKVTLADAGFIKQYGDCLGDIAARDLICAQKFNGLTVLPPLLTDEMIAQYTSALLAGTITSGWTFGAGAALQIPFAMQMAYRFNGIGVTQNVLYENQKLIANQFNSAIGKIQDSLSSTASALGKLQNVVNQNAQALNTLVKQLSSNFGAISSVLNDILSRLDPPEAEVQIDRLITGRLQSLQTYVTQQLIRAAEIRASANLAATKMSECVLGQSKRVDFCGKGYHLMSFPQSAPHGVVFLHVTYVPAQEKNFTTAPAICHDGKAHFPREGVFVSNGTHWFVTQRNFYEPQIITTDNTFVSGNCDVVIGIVNNTVYDPLQPELDSFKEELDKYFKNHTSPDVDLGDISGINASVVNIQKEIDRLNEVAKNLNESLIDLQELGKYEQYIKWPWYIWLGFIAGLIAIVMVTIMLCCMTSCCSCLKGCCSCGSCCKFDEDDSEPVLKGVKLHYT

SEQ ID NO: 179 - protein, 1273 aa, synthetic construct
  REGION 1..1273: note = Recombinant SARS-CoV-2 S Polypeptide
MFVFLVLLPLVSSQCVNLTTRTQLPPAYTNSFTRGVYYPDKVFRSSVLHSTQDLFLPFFSNVTWFHAIHVSGTNGTKRFDNPVLPFNDGVYFASIEKSNIIRGWIFGTTLDSKTQSLLIVNNATNVVIKVCEFQFCNDPFLGVSNHKNNKSWMESEFRVYSSANNCTFEYVSQPFLMDLEGKQGNFKNLREFVFKNIDGYFKIYSKHTPINLVRDLPQGFSALEPLVDLPIGINITRFQTLLALHRSYLTPGDSSSGWTAGAAAYYVGYLQPRTFLLKYNENGTITDAVDCALDPLSETKCTLKSFTVEKGIYQTSNFRVQPTESIVRFPNITNLCPFGEVFNATKFASVYAWNRKRISNCVADYSVLYNSASFSTFKCYGVSPTKLNDLCFTNVYADSFVIRGDEVRQIAPGQTGKIADYNYKLPDDFTGCVIAWNSNNLDSKVGGNYNYLYRLFRKSNLKPFERDISTEIYQAGSTPCNGVKGFNCYFPLQSYGFQPTYGVGYQPYRVVVLSFELLHAPATVCGPKKSTNLVKNKCVNFNFNGLTGTGVLTESNKKFLPFQQFGRDIADTTDAVRDPQTLEILDITPCSFGGVSVITPGTNTSNQVAVLYQGVNCTEVPVAIHADQLTPTWRVYSTGSNVFQTRAGCLIGAEHVNNSYECDIPIGAGICASYQTQTNSHQQAQSVASQSIIAYTMSLGAENSVAYSNNSIAIPTNFTISVTTEILPVSMTKTSVDCTMYICGDSTECSNLLLQYGSFCTQLNRALTGIAVEQDKNTQEVFAQVKQIYKTPPIKDFGGFNFSQILPDPSKPSKRSFIEDLLFNKVTLADAGFIKQYGDCLGDIAARDLICAQKFNGLTVLPPLLTDEMIAQYTSALLAGTITSGWTFGAGAALQIPFAMQMAYRFNGIGVTQNVLYENQKLIANQFNSAIGKIQDSLSSTASALGKLQNVVNQNAQALNTLVKQLSSNFGAISSVLNDILSRLDPPEAEVQIDRLITGRLQSLQTYVTQQLIRAAEIRASANLAATKMSECVLGQSKRVDFCGKGYHLMSFPQSAPHGVVFLHVTYVPAQEKNFTTAPAICHDGKAHFPREGVFVSNGTHWFVTQRNFYEPQIITTDNTFVSGNCDVVIGIVNNTVYDPLQPELDSFKEELDKYFKNHTSPDVDLGDISGINASVVNIQKEIDRLNEVAKNLNESLIDLQELGKYEQYIKWPWYIWLGFIAGLIAIVMVTIMLCCMTSCCSCLKGCCSCGSCCKFDEDDSEPVLKGVKLHYT

SEQ ID NO: 180 - protein, 1274 aa, synthetic construct
  REGION 1..1274: note = Recombinant SARS-CoV-2 S Polypeptide
MFVFLVLLPLVSSQCVNLTTRTQLPPAYTNSFTRGVYYPDKVFRSSVLHSTQDLFLPFFSNVTWFHAIHVSGTNGTKRFDNPVLPFNDGVYFASIEKSNIIRGWIFGTTLDSKTQSLLIVNNATNVVIKVCEFQFCNDPFLGVTSNHKNNKSWMESEFRVYSSANNCTFEYVSQPFLMDLEGKQGNFKNLREFVFKNIDGYFKIYSKHTPINLVRDLPQGFSALEPLVDLPIGINITRFQTLLALHRSYLTPGDSSSGWTAGAAAYYVGYLQPRTFLLKYNENGTITDAVDCALDPLSETKCTLKSFTVEKGIYQTSNFRVQPTESIVRFPNITNLCPFGEVFNATKFASVYAWNRKRISNCVADYSVLYNSASFSTFKCYGVSPTKLNDLCFTNVYADSFVIRGDEVRQIAPGQTGKIADYNYKLPDDFTGCVIAWNSNNLDSKVGGNYNYLYRLFRKSNLKPFERDISTEIYQAGSTPCNGVKGFNCYFPLQSYGFQPTYGVGYQPYRVVVLSFELLHAPATVCGPKKSTNLVKNKCVNFNFNGLTGTGVLTESNKKFLPFQQFGRDIADTTDAVRDPQTLEILDITPCSFGGVSVITPGTNTSNQVAVLYQGVNCTEVPVAIHADQLTPTWRVYSTGSNVFQTRAGCLIGAEHVNNSYECDIPIGAGICASYQTQTNSHQQAQSVASQSIIAYTMSLGAENSVAYSNNSIAIPTNFTISVTTEILPVSMTKTSVDCTMYICGDSTECSNLLLQYGSFCTQLNRALTGIAVEQDKNTQEVFAQVKQIYKTPPIKDFGGFNFSQILPDPSKPSKRSFIEDLLFNKVTLADAGFIKQYGDCLGDIAARDLICAQKFNGLTVLPPLLTDEMIAQYTSALLAGTITSGWTFGAGAALQIPFAMQMAYRFNGIGVTQNVLYENQKLIANQFNSAIGKIQDSLSSTASALGKLQNVVNQNAQALNTLVKQLSSNFGAISSVLNDILSRLDPPEAEVQIDRLITGRLQSLQTYVTQQLIRAAEIRASANLAATKMSECVLGQSKRVDFCGKGYHLMSFPQSAPHGVVFLHVTYVPAQEKNFTTAPAICHDGKAHFPREGVFVSNGTHWFVTQRNFYEPQIITTDNTFVSGNCDVVIGIVNNTVYDPLQPELDSFKEELDKYFKNHTSPDVDLGDISGINASVVNIQKEIDRLNEVAKNLNESLIDLQELGKYEQYIKWPWYIWLGFIAGLIAIVMVTIMLCCMTSCCSCLKGCCSCGSCCKFDEDDSEPVLKGVKLHYT

SEQ ID NO: 181 - protein, 1260 aa, synthetic construct
  REGION 1..1260: note = Recombinant SARS-CoV-2 S Polypeptide
QCVNLTTRTQLPPAYTNSFTRGVYYPDKVFRSSVLHSTQDLFLPFFSNVTWFHAIHVSGTNGTKRFDNPVLPFNDGVYFASIEKSNIIRGWIFGTTLDSKTQSLLIVNNATNVVIKVCEFQFCNDPFLDVYYHKNNKSWMKSEFRVYSSANNCTFEYVSQPFLMDLEGKQGNFKNLREFVFKNIDGYFKIYSKHTPINLVRDLPQGFSALEPLVDLPIGINITRFQTLLALHRSYLTPGDSSSGWTAGAAAYYVGYLQPRTFLLKYNENGTITDAVDCALDPLSETKCTLKSFTVEKGIYQTSNFRVQPTESIVRFPNITNLCPFGEVFNATRFASVYAWNRKRISNCVADYSVLYNSASFSTFKCYGVSPTKLNDLCFTNVYADSFVIRGDEVRQIAPGQTGKIADYNYKLPDDFTGCVIAWNSNNLDSKVGGNYNYRYRLFRKSNLKPFERDISTEIYQAGSTPCNGVQGFNCYFPLQSYGFQPTNGVGYQPYRVVVLSFELLHAPATVCGPKKSTNLVKNKCVNFNFNGLTGTGVLTESNKKFLPFQQFGRDIADTTDAVRDPQTLEILDITPCSFGGVSVITPGTNTSNQVAVLYQGVNCTEVPVAIHADQLTPTWRVYSTGSNVFQTRAGCLIGAEHVNNSYECDIPIGAGICASYQTQTNSRQQAQSVASQSIIAYTMSLGAENSVAYSNNSIAIPTNFTISVTTEILPVSMTKTSVDCTMYICGDSTECSNLLLQYGSFCTQLNRALTGIAVEQDKNTQEVFAQVKQIYKTPPIKDFGGFNFSQILPDPSKPSKRSFIEDLLFNKVTLADAGFIKQYGDCLGDIAARDLICAQKFNGLTVLPPLLTDEMIAQYTSALLAGTITSGWTFGAGAALQIPFAMQMAYRFNGIGVTQNVLYENQKLIANQFNSAIGKIQDSLSSTASALGKLQDVVNQNAQALNTLVKQLSSNFGAISSVLNDILSRLDPPEAEVQIDRLITGRLQSLQTYVTQQLIRAAEIRASANLAATKMSECVLGQSKRVDFCGKGYHLMSFPQSAPHGVVFLHVTYVPAHEKNFTTAPAICHDGKAHFPREGVFVSNGTHWFVTQRNFYEPQIITTDNTFVSGNCDVVIGIVNNTVYDPLQPELDSFKEELDKYFKNHTSPDVDLGDISGINASVVNIQKEIDRLNEVAKNLNESLIDLQELGKYEQYIKWPWYIWLGFIAGLIAIVMVTIMLCCMTSCCSCLKGCCSCGSCCKFDEDDSEPVLKGVKLHYT

SEQ ID NO: 182 - protein, 1258 aa, synthetic construct
  REGION 1..1258: note = Recombinant SARS-CoV-2 S Polypeptide
QCVNLRTRTQLPPAYTNSFTRGVYYPDKVFRSSVLHSTQDLFLPFFSNVTWFHAIHVSGTNGTKRFDNPVLPFNDGVYFASTEKSNIIRGWIFGTTLDSKTQSLLIVNNATNVVIKVCEFQFCNDPFLDVYYHKNNKSWMESGVYSSANNCTFEYVSQPFLMDLEGKQGNFKNLREFVFKNIDGYFKIYSKHTPINLVRDLPQGFSALEPLVDLPIGINITRFQTLLALHRSYLTPGDSSSGITAGAAAYYVGYLQPRTFLLKYNENGTITDAVDCALDPLSETKCTLKSFTVEKGIYQTSNFRVQPTESIVRFPNITNLCPFGEVFNATRFASVYAWNRKRISNCVADYSVLYNSASFSTFKCYGVSPTKLNDLCFTNVYADSFVIRGDEVRQIAPGQTGNIADYNYKLPDDFTGCVIAWNSNNLDSKVGGNYNYRYRLFRKSNLKPFERDISTEIYQAGSKPCNGVEGFNCYFPLQSYGFQPTNGVGYQPYRVVVLSFELLHAPATVCGPKKSTNLVKNKCVNFNFNGLTGTGVLTESNKKFLPFQQFGRDIADTTDAVRDPQTLEILDITPCSFGGVSVITPGTNTSNQVAVLYQGVNCTEVPVAIHADQLTPTWRVYSTGSNVFQTRAGCLIGAEHVNNSYECDIPIGAGICASYQTQTNSRQQAQSVASQSIIAYTMSLGAENSVAYSNNSIAIPTNFTISVTTEILPVSMTKTSVDCTMYICGDSTECSNLLLQYGSFCTQLNRALTGIAVEQDKNTQEVFAQVKQIYKTPPIKDFGGFNFSQILPDPSKPSKRSFIEDLLFNKVTLADAGFIKQYGDCLGDIAARDLICAQKFNGLTVLPPLLTDEMIAQYTSALLAGTITSGWTFGAGAALQIPFAMQMAYRFNGIGVTQNVLYENQKLIANQFNSAIGKIQDSLSSTASALGKLQNVVNQNAQALNTLVKQLSSNFGAISSVLNDILSRLDPPEAEVQIDRLITGRLQSLQTYVTQQLIRAAEIRASANLAATKMSECVLGQSKRVDFCGKGYHLMSFPQSAPHGVVFLHVTYVPAQEKNFTTAPAICHDGKAHFPREGVFVSNGTHWFVTQRNFYEPQIITTDNTFVSGNCDVVIGIVNNTVYDPLQPELDSFKEELDKYFKNHTSPDVDLGDISGINASVVNIQKEIDRLNEVAKNLNESLIDLQELGKYEQYIKWPWYIWLGFIAGLIAIVMVTIMLCCMTSCCSCLKGCCSCGSCCKFDEDDSEPVLKGVKLHYT

SEQ ID NO: 183 - protein, 1260 aa, synthetic construct
  REGION 1..1260: note = Recombinant SARS-CoV-2 S Polypeptide
QCVNLTTRTQLPPAYTNSFTRGVYYPDKVFRSSVLHSTQDLFLPFFSNVTWFHAIHVSGTNGTKRFDNPVLPFNDGVYFASIEKSNIIRGWIFGTTLDSKTQSLLIVNNATNVVIKVCEFQFCNDPFLGVSNHKNNKSWMESEFRVYSSANNCTFEYVSQPFLMDLEGKQGNFKNLREFVFKNIDGYFKIYSKHTPINLVRDLPQGFSALEPLVDLPIGINITRFQTLLALHRSYLTPGDSSSGWTAGAAAYYVGYLQPRTFLLKYNENGTITDAVDCALDPLSETKCTLKSFTVEKGIYQTSNFRVQPTESIVRFPNITNLCPFGEVFNATKFASVYAWNRKRISNCVADYSVLYNSASFSTFKCYGVSPTKLNDLCFTNVYADSFVIRGDEVRQIAPGQTGKIADYNYKLPDDFTGCVIAWNSNNLDSKVGGNYNYLYRLFRKSNLKPFERDISTEIYQAGSTPCNGVKGFNCYFPLQSYGFQPTYGVGYQPYRVVVLSFELLHAPATVCGPKKSTNLVKNKCVNFNFNGLTGTGVLTESNKKFLPFQQFGRDIADTTDAVRDPQTLEILDITPCSFGGVSVITPGTNTSNQVAVLYQGVNCTEVPVAIHADQLTPTWRVYSTGSNVFQTRAGCLIGAEHVNNSYECDIPIGAGICASYQTQTNSHQQAQSVASQSIIAYTMSLGAENSVAYSNNSIAIPTNFTISVTTEILPVSMTKTSVDCTMYICGDSTECSNLLLQYGSFCTQLNRALTGIAVEQDKNTQEVFAQVKQIYKTPPIKDFGGFNFSQILPDPSKPSKRSFIEDLLFNKVTLADAGFIKQYGDCLGDIAARDLICAQKFNGLTVLPPLLTDEMIAQYTSALLAGTITSGWTFGAGAALQIPFAMQMAYRFNGIGVTQNVLYENQKLIANQFNSAIGKIQDSLSSTASALGKLQNVVNQNAQALNTLVKQLSSNFGAISSVLNDILSRLDPPEAEVQIDRLITGRLQSLQTYVTQQLIRAAEIRASANLAATKMSECVLGQSKRVDFCGKGYHLMSFPQSAPHGVVFLHVTYVPAQEKNFTTAPAICHDGKAHFPREGVFVSNGTHWFVTQRNFYEPQIITTDNTFVSGNCDVVIGIVNNTVYDPLQPELDSFKEELDKYFKNHTSPDVDLGDISGINASVVNIQKEIDRLNEVAKNLNESLIDLQELGKYEQYIKWPWYIWLGFIAGLIAIVMVTIMLCCMTSCCSCLKGCCSCGSCCKFDEDDSEPVLKGVKLHYT

SEQ ID NO: 184 - protein, 1261 aa, synthetic construct
  REGION 1..1261: note = Recombinant SARS-CoV-2 S Polypeptide
QCVNLTTRTQLPPAYTNSFTRGVYYPDKVFRSSVLHSTQDLFLPFFSNVTWFHAIHVSGTNGTKRFDNPVLPFNDGVYFASIEKSNIIRGWIFGTTLDSKTQSLLIVNNATNVVIKVCEFQFCNDPFLGVTSNHKNNKSWMESEFRVYSSANNCTFEYVSQPFLMDLEGKQGNFKNLREFVFKNIDGYFKIYSKHTPINLVRDLPQGFSALEPLVDLPIGINITRFQTLLALHRSYLTPGDSSSGWTAGAAAYYVGYLQPRTFLLKYNENGTITDAVDCALDPLSETKCTLKSFTVEKGIYQTSNFRVQPTESIVRFPNITNLCPFGEVFNATKFASVYAWNRKRISNCVADYSVLYNSASFSTFKCYGVSPTKLNDLCFTNVYADSFVIRGDEVRQIAPGQTGKIADYNYKLPDDFTGCVIAWNSNNLDSKVGGNYNYLYRLFRKSNLKPFERDISTEIYQAGSTPCNGVKGFNCYFPLQSYGFQPTYGVGYQPYRVVVLSFELLHAPATVCGPKKSTNLVKNKCVNFNFNGLTGTGVLTESNKKFLPFQQFGRDIADTTDAVRDPQTLEILDITPCSFGGVSVITPGTNTSNQVAVLYQGVNCTEVPVAIHADQLTPTWRVYSTGSNVFQTRAGCLIGAEHVNNSYECDIPIGAGICASYQTQTNSHQQAQSVASQSIIAYTMSLGAENSVAYSNNSIAIPTNFTISVTTEILPVSMTKTSVDCTMYICGDSTECSNLLLQYGSFCTQLNRALTGIAVEQDKNTQEVFAQVKQIYKTPPIKDFGGFNFSQILPDPSKPSKRSFIEDLLFNKVTLADAGFIKQYGDCLGDIAARDLICAQKFNGLTVLPPLLTDEMIAQYTSALLAGTITSGWTFGAGAALQIPFAMQMAYRFNGIGVTQNVLYENQKLIANQFNSAIGKIQDSLSSTASALGKLQNVVNQNAQALNTLVKQLSSNFGAISSVLNDILSRLDPPEAEVQIDRLITGRLQSLQTYVTQQLIRAAEIRASANLAATKMSECVLGQSKRVDFCGKGYHLMSFPQSAPHGVVFLHVTYVPAQEKNFTTAPAICHDGKAHFPREGVFVSNGTHWFVTQRNFYEPQIITTDNTFVSGNCDVVIGIVNNTVYDPLQPELDSFKEELDKYFKNHTSPDVDLGDISGINASVVNIQKEIDRLNEVAKNLNESLIDLQELGKYEQYIKWPWYIWLGFIAGLIAIVMVTIMLCCMTSCCSCLKGCCSCGSCCKFDEDDSEPVLKGVKLHYT

SEQ ID NO: 185 - protein, 1270 aa, synthetic construct
  REGION 1..1270: note = Recombinant SARS-CoV-2 S Polypeptide
MFVFLVLLPLVSSQCVNLITRTQSYTNSFTRGVYYPDKVFRSSVLHSTQDLFLPFFSNVTWFHAIHVSGTNGTKRFDNPVLPFNDGVYFASTEKSNIIRGWIFGTTLDSKTQSLLIVNNATNVVIKVCEFQFCNDPFLDVYYHKNNKSWMESEFRVYSSANNCTFEYVSQPFLMDLEGKQGNFKNLREFVFKNIDGYFKIYSKHTPINLGRDLPQGFSALEPLVDLPIGINITRFQTLLALHRSYLTPGDSSSGWTAGAAAYYVGYLQPRTFLLKYNENGTITDAVDCALDPLSETKCTLKSFTVEKGIYQTSNFRVQPTESIVRFPNITNLCPFDEVFNATRFASVYAWNRKRISNCVADYSVLYNFAPFFAFKCYGVSPTKLNDLCFTNVYADSFVIRGNEVRQIAPGQTGNIADYNYKLPDDFTGCVIAWNSNKLDSKVGGNYNYQYRLFRKSNLKPFERDISTEIYQAGNKPCNGVAGFNCYFPLRSYGFRPTYGVGHQPYRVVVLSFELLHAPATVCGPKKSTNLVKNKCVNFNFNGLTGTGVLTESNKKFLPFQQFGRDIADTTDAVRDPQTLEILDITPCSFGGVSVITPGTNTSNQVAVLYQGVNCTEVPVAIHADQLTPTWRVYSTGSNVFQTRAGCLIGAEYVNNSYECDIPIGAGICASYQTQTKSHQQAQSVASQSIIAYTMSLGAENLVAYSNNSIAIPTNFTISVTTEILPVSMTKTSVDCTMYICGDSTECSNLLLQYGSFCTQLKRALTGIAVEQDKNTQEVFAQVKQIYKTPPIKYFGGFNFSQILPDPSKPSKRSFIEDLLFNKVTLADAGFIKQYGDCLGDIAARDLICAQKFNGLTVLPPLLTDEMIAQYTSALLAGTITSGWTFGAGAALQIPFAMQMAYRFNGIGVTQNVLYENQKLIANQFNSAIGKIQDSLSSTASALGKLQDVVNHNAQALNTLVKQLSSKFGAISSVLNDILSRLDPPEAEVQIDRLITGRLQSLQTYVTQQLIRAAEIRASANLAATKMSECVLGQSKRVDFCGKGYHLMSFPQSAPHGVVFLHVTYVPAQEKNFTTAPAICHDGKAHFPREGVFVSNGTHWFVTQRNFYEPQIITTDNTFVSGNCDVVIGIVNNTVYDPLQPELDSFKEELDKYFKNHTSPDVDLGDISGINASVVNIQKEIDRLNEVAKNLNESLIDLQELGKYEQYIKWPWYIWLGFIAGLIAIVMVTIMLCCMTSCCSCLKGCCSCGSCCKFDEDDSEPVLKGVKLHYT

SEQ ID NO: 186 - protein, 1257 aa, synthetic construct
  REGION 1..1257: note = Recombinant SARS-CoV-2 S Polypeptide
QCVNLITRTQSYTNSFTRGVYYPDKVFRSSVLHSTQDLFLPFFSNVTWFHAIHVSGTNGTKRFDNPVLPFNDGVYFASTEKSNIIRGWIFGTTLDSKTQSLLIVNNATNVVIKVCEFQFCNDPFLDVYYHKNNKSWMESEFRVYSSANNCTFEYVSQPFLMDLEGKQGNFKNLREFVFKNIDGYFKIYSKHTPINLGRDLPQGFSALEPLVDLPIGINITRFQTLLALHRSYLTPGDSSSGWTAGAAAYYVGYLQPRTFLLKYNENGTITDAVDCALDPLSETKCTLKSFTVEKGIYQTSNFRVQPTESIVRFPNITNLCPFDEVFNATRFASVYAWNRKRISNCVADYSVLYNFAPFFAFKCYGVSPTKLNDLCFTNVYADSFVIRGNEVRQIAPGQTGNIADYNYKLPDDFTGCVIAWNSNKLDSKVGGNYNYQYRLFRKSNLKPFERDISTEIYQAGNKPCNGVAGFNCYFPLRSYGFRPTYGVGHQPYRVVVLSFELLHAPATVCGPKKSTNLVKNKCVNFNFNGLTGTGVLTESNKKFLPFQQFGRDIADTTDAVRDPQTLEILDITPCSFGGVSVITPGTNTSNQVAVLYQGVNCTEVPVAIHADQLTPTWRVYSTGSNVFQTRAGCLIGAEYVNNSYECDIPIGAGICASYQTQTKSHQQAQSVASQSIIAYTMSLGAENLVAYSNNSIAIPTNFTISVTTEILPVSMTKTSVDCTMYICGDSTECSNLLLQYGSFCTQLKRALTGIAVEQDKNTQEVFAQVKQIYKTPPIKYFGGFNFSQILPDPSKPSKRSFIEDLLFNKVTLADAGFIKQYGDCLGDIAARDLICAQKFNGLTVLPPLLTDEMIAQYTSALLAGTITSGWTFGAGAALQIPFAMQMAYRFNGIGVTQNVLYENQKLIANQFNSAIGKIQDSLSSTASALGKLQDVVNHNAQALNTLVKQLSSKFGAISSVLNDILSRLDPPEAEVQIDRLITGRLQSLQTYVTQQLIRAAEIRASANLAATKMSECVLGQSKRVDFCGKGYHLMSFPQSAPHGVVFLHVTYVPAQEKNFTTAPAICHDGKAHFPREGVFVSNGTHWFVTQRNFYEPQIITTDNTFVSGNCDVVIGIVNNTVYDPLQPELDSFKEELDKYFKNHTSPDVDLGDISGINASVVNIQKEIDRLNEVAKNLNESLIDLQELGKYEQYIKWPWYIWLGFIAGLIAIVMVTIMLCCMTSCCSCLKGCCSCGSCCKFDEDDSEPVLKGVKLHYT

SEQ ID NO: 187 - protein, 1270 aa, synthetic construct; identical to SEQ ID NO: 170
  REGION 1..1270: note = Recombinant SARS-CoV-2 S Polypeptide

SEQ ID NO: 188 - protein, 1257 aa, synthetic construct
  REGION 1..1257: note = Recombinant SARS-CoV-2 S Polypeptide
QCVNLTTRTQLPPAYTNSFTRGVYYPDKVFRSSVLHSTQDLFLPFFSNVTWFHVISGTNGTKRFDNPVLPFNDGVYFASIEKSNIIRGWIFGTTLDSKTQSLLIVNNATNVVIKVCEFQFCNDPFLDHKNNKSWMESEFRVYSSANNCTFEYVSQPFLMDLEGKQGNFKNLREFVFKNIDGYFKIYSKHTPIIVREPEDLPQGFSALEPLVDLPIGINITRFQTLLALHRSYLTPGDSSSGWTAGAAAYYVGYLQPRTFLLKYNENGTITDAVDCALDPLSETKCTLKSFTVEKGIYQTSNFRVQPTESIVRFPNITNLCPFDEVFNATRFASVYAWNRKRISNCVADYSVLYNSAPFFTFKCYGVSPTKLNDLCFTNVYADSFVIRGDEVRQIAPGQTGNIADYNYKLPDDFTGCVIAWNSNKLDSKVSGNYNYLYRLFRKSNLKPFERDISTEIYQAGNKPCNGVAGFNCYFPLRSYSFRPTYGVGHQPYRVVVLSFELLHAPATVCGPKKSTNLVKNKCVNFNFNGLKGTGVLTESNKKFLPFQQFGRDIADTTDAVRDPQTLEILDITPCSFGGVSVITPGTNTSNQVAVLYQGVNCTEVPVAIHADQLTPTWRVYSTGSNVFQTRAGCLIGAEYVNNSYECDIPIGAGICASYQTQTKSHQQAQSVASQSIIAYTMSLGAENSVAYSNNSIAIPTNFTISVTTEILPVSMTKTSVDCTMYICGDSTECSNLLLQYGSFCTQLKRALTGIAVEQDKNTQEVFAQVKQIYKTPPIKYFGGFNFSQILPDPSKPSKRSFIEDLLFNKVTLADAGFIKQYGDCLGDIAARDLICAQKFKGLTVLPPLLTDEMIAQYTSALLAGTITSGWTFGAGAALQIPFAMQMAYRFNGIGVTQNVLYENQKLIANQFNSAIGKIQDSLSSTASALGKLQDVVNHNAQALNTLVKQLSSKFGAISSVLNDIFSRLDPPEAEVQIDRLITGRLQSLQTYVTQQLIRAAEIRASANLAATKMSECVLGQSKRVDFCGKGYHLMSFPQSAPHGVVFLHVTYVPAQEKNFTTAPAICHDGKAHFPREGVFVSNGTHWFVTQRNFYEPQIITTDNTFVSGNCDVVIGIVNNTVYDPLQPELDSFKEELDKYFKNHTSPDVDLGDISGINASVVNIQKEIDRLNEVAKNLNESLIDLQELGKYEQYIKWPWYIWLGFIAGLIAIVMVTIMLCCMTSCCSCLKGCCSCGSCCKFDEDDSEPVLKGVKLHYT

SEQ ID NO: 189 - protein, 1268 aa, synthetic construct
  REGION 1..1268: note = Recombinant SARS-CoV-2 S Polypeptide
MFGFLVLLPLVSSQCVNLITRTQSYTNSFTRGVYYPDKVFRSSVLHSTQDLFLPFFSNVTWFHAISGTNGTKRFDNPVLPFNDGVYFASTEKSNIIRGWIFGTTLDSKTQSLLIVNNATNVVIKVCEFQFCNDPFLDVYYHKNNKSWMESEFRVYSSANNCTFEYVSQPFLMDLEGKQGNFKNLREFVFKNIDGYFKIYSKHTPINLGRDLPQGFSALEPLVDLPIGINITRFQTLLALHRSYLTPGDSSSGWTAGAAAYYVGYLQPRTFLLKYNENGTITDAVDCALDPLSETKCTLKSFTVEKGIYQTSNFRVQPTESIVRFPNITNLCPFDEVFNATRFASVYAWNRKRISNCVADYSVLYNFAPFFAFKCYGVSPTKLNDLCFTNVYADSFVIRGNEVSQIAPGQTGNIADYNYKLPDDFTGCVIAWNSNNLDSKVGGNYNYRYRLFRKSNLKPFERDISTEIYQAGNKPCNGVAGVNCYFPLQSYGFRPTYGVGHQPYRVVVLSFELLHAPATVCGPKKSTNLVKNKCVNFNFNGLTGTGVLTESNKKFLPFQQFGRDIADTTDAVRDPQTLEILDITPCSFGGVSVITPGTNTSNQVAVLYQGVNCTEVPVAIHADQLTPTWRVYSTVSNVFQTRAGCLIGAEYVNNSYECDIPIGAGICASYQTQTKSHQQAQSVASQSIIAYTMSLGAENSVAYSNNSIAIPTNFTISVTTEILPVSMTKTSVDCTMYICGDSTECSNLLLQYGSFCTQLKRALTGIAVEQDKNTQEVFAQVKQIYKTPPIKYFGGFNFSQILPDPSKPSKRSFIEDLLFNKVTLADAGFIKQYGDCLGDIAARDLICAQKFNGLTVLPPLLTDEMIAQYTSALLAGTITSGWTFGAGAALQIPFAMQMAYRFNGIGVTQNVLYENQKLIANQFNSAIGKIQDSLSSTASALGKLQDVVNHNAQALNTLVKQLSSKFGAISSVLNDILSRLDPPEAEVQIDRLITGRLQSLQTYVTQQLIRAAEIRASANLAATKMSECVLGQSKRVDFCGKGYHLMSFPQSAPHGVVFLHVTYVPAQEKNFTTAPAICHDGKAHFPREGVFVSNGTHWFVTQRNFYEPQIITTDNTFVSGNCDVVIGIVNNTVYDPLQPELDSFKEELDKYFKNHTSPDVDLGDISGINASVVNIQKEIDRLNEVAKNLNESLIDLQELGKYEQYIKWPWYIWLGFIAGLIAIVMVTIMLCCMTSCCSCLKGCCSCGSCCKFDEDDSEPVLKGVKLHYT

SEQ ID NO: 190 - protein, 1255 aa, synthetic construct
  REGION 1..1255: note = Recombinant SARS-CoV-2 S Polypeptide
QCVNLITRTQSYTNSFTRGVYYPDKVFRSSVLHSTQDLFLPFFSNVTWFHAISGTNGTKRFDNPVLPFNDGVYFASTEKSNIIRGWIFGTTLDSKTQSLLIVNNATNVVIKVCEFQFCNDPFLDVYYHKNNKSWMESEFRVYSSANNCTFEYVSQPFLMDLEGKQGNFKNLREFVFKNIDGYFKIYSKHTPINLGRDLPQGFSALEPLVDLPIGINITRFQTLLALHRSYLTPGDSSSGWTAGAAAYYVGYLQPRTFLLKYNENGTITDAVDCALDPLSETKCTLKSFTVEKGIYQTSNFRVQPTESIVRFPNITNLCPFDEVFNATRFASVYAWNRKRISNCVADYSVLYNFAPFFAFKCYGVSPTKLNDLCFTNVYADSFVIRGNEVSQIAPGQTGNIADYNYKLPDDFTGCVIAWNSNNLDSKVGGNYNYRYRLFRKSNLKPFERDISTEIYQAGNKPCNGVAGVNCYFPLQSYGFRPTYGVGHQPYRVVVLSFELLHAPATVCGPKKSTNLVKNKCVNFNFNGLTGTGVLTESNKKFLPFQQFGRDIADTTDAVRDPQTLEILDITPCSFGGVSVITPGTNTSNQVAVLYQGVNCTEVPVAIHADQLTPTWRVYSTVSNVFQTRAGCLIGAEYVNNSYECDIPIGAGICASYQTQTKSHQQAQSVASQSIIAYTMSLGAENSVAYSNNSIAIPTNFTISVTTEILPVSMTKTSVDCTMYICGDSTECSNLLLQYGSFCTQLKRALTGIAVEQDKNTQEVFAQVKQIYKTPPIKYFGGFNFSQILPDPSKPSKRSFIEDLLFNKVTLADAGFIKQYGDCLGDIAARDLICAQKFNGLTVLPPLLTDEMIAQYTSALLAGTITSGWTFGAGAALQIPFAMQMAYRFNGIGVTQNVLYENQKLIANQFNSAIGKIQDSLSSTASALGKLQDVVNHNAQALNTLVKQLSSKFGAISSVLNDILSRLDPPEAEVQIDRLITGRLQSLQTYVTQQLIRAAEIRASANLAATKMSECVLGQSKRVDFCGKGYHLMSFPQSAPHGVVFLHVTYVPAQEKNFTTAPAICHDGKAHFPREGVFVSNGTHWFVTQRNFYEPQIITTDNTFVSGNCDVVIGIVNNTVYDPLQPELDSFKEELDKYFKNHTSPDVDLGDISGINASVVNIQKEIDRLNEVAKNLNESLIDLQELGKYEQYIKWPWYIWLGFIAGLIAIVMVTIMLCCMTSCCSCLKGCCSCGSCCKFDEDDSEPVLKGVKLHYT

SEQ ID NO: 191 - protein, 1268 aa, synthetic construct
  REGION 1..1268: note = Recombinant SARS-CoV-2 S Polypeptide
MFVFLVLLPLVSSQCVNLITRTQSYTNSFTRGVYYPDKVFRSSVLHSTQDLFLPFFSNVTWFHAISGTNGTKRFDNPVLPFNDGVYFASTEKSNIIRGWIFGTTLDSKTQSLLIVNNATNVVIKVCEFQFCNDPFLDVYYHKNNKSWMESEFRVYSSANNCTFEYVSQPFLMDLEGKQGNFKNLREFVFKNIDGYFKIYSKHTPINLGRDLPQGFSALEPLVDLPIGINITRFQTLLALHRSYLTPGDSSSGWTAGAAAYYVGYLQPRTFLLKYNENGTITDAVDCALDPLSETKCTLKSFTVEKGIYQTSNFRVQPTESIVRFPNITNLCPFDEVFNATRFASVYAWNRKRISNCVADYSVLYNFAPFFAFKCYGVSPTKLNDLCFTNVYADSFVIRGNEVSQIAPGQTGNIADYNYKLPDDFTGCVIAWNSNKLDSKVGGNYNYRYRLFRKSNLKPFERDISTEIYQAGNKPCNGVAGVNCYFPLQSYGFRPTYGVGHQPYRVVVLSFELLHAPATVCGPKKSTNLVKNKCVNFNFNGLTGTGVLTESNKKFLPFQQFGRDIADTTDAVRDPQTLEILDITPCSFGGVSVITPGTNTSNQVAVLYQGVNCTEVPVAIHADQLTPTWRVYSTGSNVFQTRAGCLIGAEYVNNSYECDIPIGAGICASYQTQTKSHQQAQSVASQSIIAYTMSLGAENSVAYSNNSIAIPTNFTISVTTEILPVSMTKTSVDCTMYICGDSTECSNLLLQYGSFCTQLKRALTGIAVEQDKNTQEVFAQVKQIYKTPPIKYFGGFNFSQILPDPSKPSKRSFIEDLLFNKVTLADAGFIKQYGDCLGDIAARDLICAQKFNGLTVLPPLLTDEMIAQYTSALLAGTITSGWTFGAGAALQIPFAMQMAYRFNGIGVTQNVLYENQKLIANQFNSAIGKIQDSLSSTASALGKLQDVVNHNAQALNTLVKQLSSKFGAISSVLNDILSRLDPPEAEVQIDRLITGRLQSLQTYVTQQLIRAAEIRASANLAATKMSECVLGQSKRVDFCGKGYHLMSFPQSAPHGVVFLHVTYVPAQEKNFTTAPAICHDGKAHFPREGVFVSNGTHWFVTQRNFYEPQIITTDNTFVSGNCDVVIGIVNNTVYDPLQPELDSFKEELDKYFKNHTSPDVDLGDISGINASVVNIQKEIDRLNEVAKNLNESLIDLQELGKYEQYIKWPWYIWLGFIAGLIAIVMVTIMLCCMTSCCSCLKGCCSCGSCCKFDEDDSEPVLKGVKLHYT

SEQ ID NO: 192 - protein, 1255 aa, synthetic construct
  REGION 1..1255: note = Recombinant SARS-CoV-2 S Polypeptide
QCVNLITRTQSYTNSFTRGVYYPDKVFRSSVLHSTQDLFLPFFSNVTWFHAISGTNGTKRFDNPVLPFNDGVYFASTEKSNIIRGWIFGTTLDSKTQSLLIVNNATNVVIKVCEFQFCNDPFLDVYYHKNNKSWMESEFRVYSSANNCTFEYVSQPFLMDLEGKQGNFKNLREFVFKNIDGYFKIYSKHTPINLGRDLPQGFSALEPLVDLPIGINITRFQTLLALHRSYLTPGDSSSGWTAGAAAYYVGYLQPRTFLLKYNENGTITDAVDCALDPLSETKCTLKSFTVEKGIYQTSNFRVQPTESIVRFPNITNLCPFDEVFNATRFASVYAWNRKRISNCVADYSVLYNFAPFFAFKCYGVSPTKLNDLCFTNVYADSFVIRGNEVSQIAPGQTGNIADYNYKLPDDFTGCVIAWNSNKLDSKVGGNYNYRYRLFRKSNLKPFERDISTEIYQAGNKPCNGVAGVNCYFPLQSYGFRPTYGVGHQPYRVVVLSFELLHAPATVCGPKKSTNLVKNKCVNFNFNGLTGTGVLTESNKKFLPFQQFGRDIADTTDAVRDPQTLEILDITPCSFGGVSVITPGTNTSNQVAVLYQGVNCTEVPVAIHADQLTPTWRVYSTGSNVFQTRAGCLIGAEYVNNSYECDIPIGAGICASYQTQTKSHQQAQSVASQSIIAYTMSLGAENSVAYSNNSIAIPTNFTISVTTEILPVSMTKTSVDCTMYICGDSTECSNLLLQYGSFCTQLKRALTGIAVEQDKNTQEVFAQVKQIYKTPPIKYFGGFNFSQILPDPSKPSKRSFIEDLLFNKVTLADAGFIKQYGDCLGDIAARDLICAQKFNGLTVLPPLLTDEMIAQYTSALLAGTITSGWTFGAGAALQIPFAMQMAYRFNGIGVTQNVLYENQKLIANQFNSAIGKIQDSLSSTASALGKLQDVVNHNAQALNTLVKQLSSKFGAISSVLNDILSRLDPPEAEVQIDRLITGRLQSLQTYVTQQLIRAAEIRASANLAATKMSECVLGQSKRVDFCGKGYHLMSFPQSAPHGVVFLHVTYVPAQEKNFTTAPAICHDGKAHFPREGVFVSNGTHWFVTQRNFYEPQIITTDNTFVSGNCDVVIGIVNNTVYDPLQPELDSFKEELDKYFKNHTSPDVDLGDISGINASVVNIQKEIDRLNEVAKNLNESLIDLQELGKYEQYIKWPWYIWLGFIAGLIAIVMVTIMLCCMTSCCSCLKGCCSCGSCCKFDEDDSEPVLKGVKLHYT

SEQ ID NO: 193 - protein, 13 aa, synthetic construct
  REGION 1..13: note = signal peptide
MFGFLVLLPLVSS

SEQ ID NO: 194 - protein, 1270 aa, synthetic construct
  REGION 1..1270: note = Recombinant SARS-CoV-2 S Polypeptide
MFVFLVLLPLVSSQCVNLITRTQSYTNSFTRGVYYPDKVFRSSVLHSTQDLFLPFFSNVTWFHAIHVSGTNGTKRFDNPVLPFNDGVYFASTEKSNIIRGWIFGTTLDSKTQSLLIVNNATNVVIKVCEFQFCNDPFLDVYYHKNNKSWMESEFRVYSSANNCTFEYVSQPFLMDLEGKQGNFKNLREFVFKNIDGYFKIYSKHTPINLGRDLPQGFSALEPLVDLPIGINITRFQTLLALHRSYLTPGDSSSGWTAGAAAYYVGYLQPRTFLLKYNENGTITDAVDCALDPLSETKCTLKSFTVEKGIYQTSNFRVQPTESIVRFPNITNLCPFDEVFNATRFASVYAWNRKRISNCVADYSVLYNFAPFFAFKCYGVSPTKLNDLCFTNVYADSFVIRGNEVSQIAPGQTGNIADYNYKLPDDFTGCVIAWNSNKLDSKVGGNYNYLYRLFRKSNLKPFERDISTEIYQAGNKPCNGVAGFNCYFPLRSYGFRPTYGVGHQPYRVVVLSFELLHAPATVCGPKKSTNLVKNKCVNFNFNGLTGTGVLTESNKKFLPFQQFGRDIADTTDAVRDPQTLEILDITPCSFGGVSVITPGTNTSNQVAVLYQGVNCTEVPVAIHADQLTPTWRVYSTGSNVFQTRAGCLIGAEYVNNSYECDIPIGAGICASYQTQTKSHQQAQSVASQSIIAYTMSLGAENSVAYSNNSIAIPTNFTISVTTEILPVSMTKTSVDCTMYICGDSTECSNLLLQYGSFCTQLKRALTGIAVEQDKNTQEVFAQVKQIYKTPPIKYFGGFNFSQILPDPSKPSKRSFIEDLLFNKVTLADAGFIKQYGDCLGDIAARDLICAQKFNGLTVLPPLLTDEMIAQYTSALLAGTITSGWTFGAGAALQIPFAMQMAYRFNGIGVTQNVLYENQKLIANQFNSAIGKIQDSLSSTASALGKLQDVVNHNAQALNTLVKQLSSKFGAISSVLNDILSRLDPPEAEVQIDRLITGRLQSLQTYVTQQLIRAAEIRASANLAATKMSECVLGQSKRVDFCGKGYHLMSFPQSAPHGVVFLHVTYVPAQEKNFTTAPAICHDGKAHFPREGVFVSNGTHWFVTQRNFYEPQIITTDNTFVSGNCDVVIGIVNNTVYDPLQPELDSFKEELDKYFKNHTSPDVDLGDISGINASVVNIQKEIDRLNEVAKNLNESLIDLQELGKYEQYIKWPWYIWLGFIAGLIAIVMVTIMLCCMTSCCSCLKGCCSCGSCCKFDEDDSEPVLKGVKLHYT

SEQ ID NO: 195 - protein, 1257 aa, synthetic construct
  REGION 1..1257: note = Recombinant SARS-CoV-2 S Polypeptide
QCVNLITRTQSYTNSFTRGVYYPDKVFRSSVLHSTQDLFLPFFSNVTWFHAIHVSGTNGTKRFDNPVLPFNDGVYFASTEKSNIIRGWIFGTTLDSKTQSLLIVNNATNVVIKVCEFQFCNDPFLDVYYHKNNKSWMESEFRVYSSANNCTFEYVSQPFLMDLEGKQGNFKNLREFVFKNIDGYFKIYSKHTPINLGRDLPQGFSALEPLVDLPIGINITRFQTLLALHRSYLTPGDSSSGWTAGAAAYYVGYLQPRTFLLKYNENGTITDAVDCALDPLSETKCTLKSFTVEKGIYQTSNFRVQPTESIVRFPNITNLCPFDEVFNATRFASVYAWNRKRISNCVADYSVLYNFAPFFAFKCYGVSPTKLNDLCFTNVYADSFVIRGNEVSQIAPGQTGNIADYNYKLPDDFTGCVIAWNSNKLDSKVGGNYNYLYRLFRKSNLKPFERDISTEIYQAGNKPCNGVAGFNCYFPLRSYGFRPTYGVGHQPYRVVVLSFELLHAPATVCGPKKSTNLVKNKCVNFNFNGLTGTGVLTESNKKFLPFQQFGRDIADTTDAVRDPQTLEILDITPCSFGGVSVITPGTNTSNQVAVLYQGVNCTEVPVAIHADQLTPTWRVYSTGSNVFQTRAGCLIGAEYVNNSYECDIPIGAGICASYQTQTKSHQQAQSVASQSIIAYTMSLGAENSVAYSNNSIAIPTNFTISVTTEILPVSMTKTSVDCTMYICGDSTECSNLLLQYGSFCTQLKRALTGIAVEQDKNTQEVFAQVKQIYKTPPIKYFGGFNFSQILPDPSKPSKRSFIEDLLFNKVTLADAGFIKQYGDCLGDIAARDLICAQKFNGLTVLPPLLTDEMIAQYTSALLAGTITSGWTFGAGAALQIPFAMQMAYRFNGIGVTQNVLYENQKLIANQFNSAIGKIQDSLSSTASALGKLQDVVNHNAQALNTLVKQLSSKFGAISSVLNDILSRLDPPEAEVQIDRLITGRLQSLQTYVTQQLIRAAEIRASANLAATKMSECVLGQSKRVDFCGKGYHLMSFPQSAPHGVVFLHVTYVPAQEKNFTTAPAICHDGKAHFPREGVFVSNGTHWFVTQRNFYEPQIITTDNTFVSGNCDVVIGIVNNTVYDPLQPELDSFKEELDKYFKNHTSPDVDLGDISGINASVVNIQKEIDRLNEVAKNLNESLIDLQELGKYEQYIKWPWYIWLGFIAGLIAIVMVTIMLCCMTSCCSCLKGCCSCGSCCKFDEDDSEPVLKGVKLHYT

SEQ ID NO: 196 - DNA, 3813 bp, synthetic construct
  source 1..3813: mol_type = other DNA
atgttcgtcttcctggtgctgctgcccctggtgtccagccagtgcgtgaacctgaccactaggactcagctgcctcccgcttacaccaactcattcactcgcggtgtgtactaccctgacaaggtcttccgttcttcagtgctgcactcaactcaggacctgttcctgcccttcttctccaacgtcacctggttccacgtcatctccggcaccaacggcactaagcgcttcgacaacccagtgctgcctttcaacgacggtgtctacttcgcttcaattgagaagtccaacatcatccgtggatggatcttcggcaccactctggacagcaagactcagtctctgctgatcgtcaacaacgccaccaacgtggtcatcaaggtctgcgaattccagttctgcaacgacccattcctggaccacaagaacaacaagtcatggatggagtccgaattccgcgtctactccagcgctaacaactgcactttcgagtacgtgtcccagcctttcctgatggacctggaaggaaagcagggtaacttcaagaacctgagggagttcgtgttcaagaacatcgacggatacttcaagatttacagcaagcacaccccaatcattgtgcgcgagccggaggacctgcctcagggtttctctgctctggagccactggtggacctgcctatcggcatcaacatcacccgcttccagactctgctggctctgcaccgttcctacctgactccaggcgactcatcttctggatggactgctggagctgctgcttactacgtgggctacctgcagcctcgcaccttcctgctgaagtacaacgaaaacggaaccatcactgacgccgtcgactgcgctctggaccctctgtcagaaaccaagtgcactctgaagtccttcaccgtggagaagggcatctaccagacttcaaacttcagggtgcagcccaccgaatccatcgtcagattccctaacatcactaacctgtgccccttcgacgaggtcttcaacgccacccgcttcgcttccgtgtacgcctggaacaggaagagaatctcaaactgcgtcgctgactactccgtgctgtacaaccttgccccgttctttaccttcaagtgctacggcgtgtcaccaactaagctgaacgacctgtgcttcaccaacgtctacgccgactccttcgtgatcaggggagacgaggtcagacagatcgctcctggccagactggaaatatcgccgactacaactacaagctgcccgacgacttcaccggttgcgtcatcgcttggaacagcaacaaactggactctaaagtgagtggcaactacaactacctgtaccgcctgttccgtaagtcaaacctgaagccattcgagagggacatcagcactgaaatctaccaggccggaaataaaccttgcaacggtgtcgcgggcttcaactgctacttccccctgaggtcctactctttccgaccaacttatggtgtgggccaccagccttacagagtggtcgtgctgagcttcgaactgctccacgctcctgctactgtgtgcggtccaaagaagtctaccaacctggtcaagaacaagtgcgtgaacttcaacttcaacggcctgaaaggaactggtgtcctgaccgagagcaacaagaagttcctgcccttccagcagttcggaagggacatcgctgacaccactgacgctgtgcgcgaccctcagaccctggaaatcctggacatcactccatgctcattcggaggtgtctccgtgatcacccctggcaccaacacttctaaccaggtcgctgtgctgtaccagggcgtcaactgcaccgaggtccctgtggccatccacgctgaccagctgacccccacttggcgcgtgtactccaccggcagcaacgtgttccagactcgtgctggttgcctgatcggcgccgagtacgtgaacaacagctacgaatgcgacatccccatcggcgctggaatctgcgcctcttaccagacccagactaagagccaccagcaggctcagtctgtggcctctcagtcaatcatcgcttacaccatgtcactgggcgctgaaaactccgtggcctactctaacaactcaatcgccatccccaccaacttcactatcagcgtgaccactgagatcctgccagtcagcatgaccaagacttctgtggactgcactatgtacatctgcggagacagcaccgaatgctctaacctgctgctgcagtacggctctttctgcacccagctgaagcgtgctctgactggaatcgccgtggagcaggacaagaacactcaggaagtcttcgctcaggtgaagcaaatctacaagaccccacctatcaagtacttcggcggattcaacttctcccagatcctgcctgacccctccaagccaagcaagcgctctttcatcgaggacctgctgttcaacaaggtcactctggccgacgctggattcatcaagcagtacggagactgcctgggtgacatcgccgctcgtgacctgatctgcgctcagaagttcaagggtctgaccgtgctgcccccactgctgactgacgaaatgatcgcccagtacactagcgccctgctggctggaaccatcacttctggttggaccttcggtgctggcgccgctctgcagatccctttcgctatgcagatggcctaccgtttcaacggaatcggtgtcacccagaacgtgctgtacgagaaccagaagctgatcgctaaccagttcaactcagccatcggaaagatccaggacagcctgagctctactgcctctgctctgggcaagctgcaggacgtcgtgaaccataacgcccaggctctgaacaccctggtcaagcagctgtcatccaagttcggtgctatcagctctgtgctgaacgacatcttctcccgcctggaccctcccgaggccgaagtgcagatcgaccgcctgatcactggccgtctgcagtcactgcagacctacgtgactcagcagctgatcagggccgctgaaatcagagcctccgctaacctggccgctaccaagatgagcgagtgcgtcctgggtcaatctaagcgtgtggacttctgcggcaagggataccacctgatgtcattccctcagtctgctccccacggtgtggtgttcctgcacgtcacctacgtgccagcccaggagaagaacttcaccactgcccctgctatctgccacgacggcaaggctcacttccccagggaaggtgtcttcgtgagcaacggcacccactggttcgtcactcagagaaacttctacgagccacagatcatcaccactgacaacactttcgtgtctggaaactgcgacgtggtcatcggtatcgtcaacaacaccgtgtacgaccccctgcagccagagctggactcattcaaggaggaactggacaagtacttcaagaaccacacctcccctgacgtcgacctgggcgacatctcaggaatcaacgcttccgtcgtgaacatccagaaggagatcgaccgcctgaacgaagtggccaagaacctgaacgaaagcctgatcgacctgcaggagctgggcaagtacgaacagtacatcaagtggccttggtacatctggctgggtttcatcgctggcctcatcgctatcgtgatggtgaccatcatgctgtgctgcatgacttcatgctgctcctgcctgaagggctgctgcagctgcggatcttgctgcaagttcgacgaggacgactctgaacccgtcctgaagggcgtgaagctgcactacacctaa

SEQ ID NO: 197 - DNA, 3813 bp, synthetic construct
  source 1..3813: mol_type = other DNA
atgttcgtcttcctggtgctgctgcctctggtctccagccagtgcgtgaacctgatcaccaggactcagtcctacaccaacagcttcactagaggtgtgtactaccctgacaaggtcttccgctcttcagtgctgcactctactcaggacctgttcctgcccttcttctcaaacgtcacctggttccacgccatccacgtgtccggcaccaacggcactaagagattcgacaacccagtgctgcctttcaacgacggcgtctacttcgcttctaccgagaagtcaaacatcatccgcggatggatcttcggcaccactctggactccaagactcagagcctgctgatcgtcaacaacgccaccaacgtggtcatcaaggtgtgcgaattccagttctgcaacgacccattcctggacgtgtactaccacaagaacaacaagtcttggatggagtcagaattcagagtctactccagcgctaacaactgcactttcgagtacgtgtctcagcctttcctgatggacctggaaggaaagcagggtaacttcaagaacctgcgtgagttcgtcttcaagaacatcgacggttacttcaagatttactctaagcacaccccaatcaacctgggtagggacctgcctcagggcttctcagctctggagccactggtggacctgcctatcggcatcaacatcaccaggttccagactctgctggctctgcacagaagctacctgactccaggagactcatcttctggatggactgctggagctgctgcttactacgtgggttacctgcagcctcgcaccttcctgctgaagtacaacgaaaacggcaccatcactgacgccgtcgactgcgctctggaccctctgtctgaaaccaagtgcactctgaagtcattcaccgtggagaagggcatctaccagacttccaacttccgcgtgcagcccaccgaaagcatcgtccgtttccctaacatcactaacctgtgccccttcgacgaggtcttcaacgccacccgtttcgcttctgtgtacgcctggaaccgcaagcgtatctctaactgcgtcgccgactactcagtgctgtacaacttcgctcccttcttcgccttcaagtgctacggagtgtcaccaactaagctgaacgacctgtgcttcaccaacgtctacgctgactctttcgtgatcaggggtaacgaggtctcacagatcgctccaggccagactggaaacatcgccgactacaactacaagctgcctgacgacttcaccggttgcgtcatcgcttggaactccaacaagctggacagcaaagtgggtggcaactacaactacctgtacaggctgttcagaaagtccaacctgaagcccttcgagcgtgacatcagcactgaaatctaccaggctggtaacaagccatgcaacggtgtcgccggcttcaactgctacttccccctgcgctcctacggcttccgtccaacctacggtgtgggccaccagccttacagggtggtcgtgctgtccttcgaactcctccacgctccagctactgtgtgcggaccaaagaagagcaccaacctggtcaagaacaagtgcgtgaacttcaacttcaacggtctgaccggaactggtgtcctgaccgagtctaacaagaagttcctgcccttccagcagttcggtcgtgacatcgctgacactaccgacgccgtgagggacccccagaccctggaaatcctggacatcactccatgctctttcggaggtgtctcagtgatcactccaggaaccaacacttcaaaccaggtcgctgtgctgtaccagggtgtcaactgcaccgaagtccctgtggccatccacgctgaccagctgacccccacttggagagtgtacagcaccggctctaacgtcttccagactcgcgctggttgcctgatcggcgccgagtacgtgaacaactcttacgaatgcgacatccccatcggcgctggaatctgcgcctcataccagacccagactaagtcccaccagcaggctcagagcgtcgcctcacagtccatcatcgcttacaccatgtctctgggcgctgaaaactcagtggcctactcaaacaactccatcgccatccctaccaacttcactatctccgtgaccactgagatcctgcccgtctccatgaccaagactagcgtggactgcactatgtacatctgcggagactccaccgaatgcagcaacctgctgctgcagtacggtagcttctgcacccagctgaagcgtgctctgactggcatcgccgtggagcaggacaagaacactcaggaagtcttcgctcaggtgaagcaaatctacaagacccctcccatcaagtacttcggcggattcaacttctcccagatcctgcctgaccccagcaagccatctaagagatcattcatcgaggacctgctgttcaacaaggtcactctggccgacgctggtttcatcaagcagtacggagactgcctgggtgacatcgccgctcgcgacctgatctgcgctcagaagttcaacggcctgaccgtgctgccacctctgctgactgacgaaatgatcgcccagtacacttccgccctgctggctggaaccatcacttctggttggaccttcggtgctggtgctgctctgcagatccctttcgctatgcagatggcctacaggttcaacggaatcggtgtcacccagaacgtgctgtacgagaaccagaagctgatcgctaaccagttcaactccgccatcggcaagatccaggactccctgagctctactgccagcgctctgggaaagctgcaggacgtcgtgaaccacaacgcccaggctctgaacaccctggtcaagcagctgtcatccaagttcggagctatcagctctgtgctgaacgacatcctctcccgcctggaccctcctgaggctgaagtccagatcgacaggctgatcactggtagactgcagtctctgcagacctacgtgactcagcagctgatccgcgccgctgaaatccgtgcctcagctaacctggccgctaccaagatgtctgagtgcgtcctgggccagagcaagagggtggacttctgcggcaagggataccacctgatgtctttccctcagtcagctccccacggagtcgtgttcctgcacgtcacctacgtgccagcccaggagaagaacttcaccactgcccctgctatctgccacgacggcaaggctcacttcccccgtgaaggagtcttcgtgtccaacggcacccactggttcgtcactcagaggaacttctacgagccacagatcatcaccactgacaacactttcgtgagcggcaactgcgacgtggtcatcggtatcgtcaacaacaccgtgtacgaccccctgcagccagagctggactccttcaaggaagagctggacaagtacttcaagaaccacaccagcccagacgtcgacctgggcgacatctctggaatcaacgcttcagtcgtgaacatccagaaggagatcgaccgtctgaacgaagtggccaagaacctgaacgaatctctgatcgacctgcaggagctgggaaagtacgaacagtacatcaagtggccttggtacatctggctgggtttcatcgctggcctcatcgctatcgtgatggtgaccatcatgctgtgctgcatgacttcctgctgcagctgcctgaagggctgctgctcttgcggatcatgctgcaagttcgacgaggacgactcagaacccgtcctgaagggcgtgaagctgcactacacctaa

SEQ ID NO: 198 - DNA, 3807 bp, synthetic construct
  source 1..3807: mol_type = other DNA
atgttcgtcttcctggtgctgctgcctctggtctccagccagtgcgtgaacctgatcaccaggactcagtcctacaccaacagcttcactagaggtgtgtactaccctgacaaggtcttccgctcttcagtgctgcactctactcaggacctgttcctgcccttcttctcaaacgtcacctggttccacgccatctccggcaccaacggcactaagagattcgacaacccagtgctgcctttcaacgacggcgtctacttcgcttctaccgagaagtcaaacatcatccgcggatggatcttcggcaccactctggactccaagactcagagcctgctgatcgtcaacaacgccaccaacgtggtcatcaaggtgtgcgaattccagttctgcaacgacccattcctggacgtgtactaccacaagaacaacaagtcttggatggagtcagaattcagagtctactccagcgctaacaactgcactttcgagtacgtgtctcagcctttcctgatggacctggaaggaaagcagggtaacttcaagaacctgcgtgagttcgtcttcaagaacatcgacggttacttcaagatttactctaagcacaccccaatcaacctgggtagggacctgcctcagggcttctcagctctggagccactggtggacctgcctatcggcatcaacatcaccaggttccagactctgctggctctgcacagaagctacctgactccaggagactcatcttctggatggactgctggagctgctgcttactacgtgggttacctgcagcctcgcaccttcctgctgaagtacaacgaaaacggcaccatcactgacgccgtcgactgcgctctggaccctctgtctgaaaccaagtgcactctgaagtcattcaccgtggagaagggcatctaccagacttccaacttccgcgtgcagcccaccgaaagcatcgtccgtttccctaacatcactaacctgtgccccttcgacgaggtcttcaacgccacccgtttcgcttctgtgtacgcctggaaccgcaagcgtatctctaactgcgtcgccgactactcagtgctgtacaacttcgctcccttcttcgccttcaagtgctacggagtgtcaccaactaagctgaacgacctgtgcttcaccaacgtctacgctgactctttcgtgatcaggggtaacgaggtctcacagatcgctccaggccagactggaaacatcgccgactacaactacaagctgcctgacgacttcaccggttgcgtcatcgcttggaactccaacaagctggacagcaaagtgggtggcaactacaactaccgttacaggctgttcagaaagtccaacctgaagcccttcgagcgtgacatcagcactgaaatctaccaggctggtaacaagccatgcaacggtgtcgccggcgtcaactgctacttccccctgcagtcctacggcttccgtccaacctacggtgtgggccaccagccttacagggtggtcgtgctgtccttcgaactcctccacgctccagctactgtgtgcggaccaaagaagagcaccaacctggtcaagaacaagtgcgtgaacttcaacttcaacggtctgaccggaactggtgtcctgaccgagtctaacaagaagttcctgcccttccagcagttcggtcgtgacatcgctgacactaccgacgccgtgagggacccccagaccctggaaatcctggacatcactccatgctctttcggaggtgtctcagtgatcactccaggaaccaacacttcaaaccaggtcgctgtgctgtaccagggtgtcaactgcaccgaagtccctgtggccatccacgctgaccagctgacccccacttggagagtgtacagcaccggctctaacgtcttccagactcgcgctggttgcctgatcggcgccgagtacgtgaacaactcttacgaatgcgacatccccatcggcgctggaatctgcgcctcataccagacccagactaagtcccaccagcaggctcagagcgtcgcctcacagtccatcatcgcttacaccatgtctctgggcgctgaaaactcagtggcctactcaaacaactccatcgccatccctaccaacttcactatctccgtgaccactgagatcctgcccgtctccatgaccaagactagcgtggactgcactatgtacatctgcggagactccaccgaatgcagcaacctgctgctgcagtacggtagcttctgcacccagctgaagcgtgctctgactggcatcgccgtggagcaggacaagaacactcaggaagtcttcgctcaggtgaagcaaatctacaagacccctcccatcaagtacttcggcggattcaacttctcccagatcctgcctgaccccagcaagccatctaagagatcattcatcgaggacctgctgttcaacaaggtcactctggccgacgctggtttcatcaagcagtacggagactgcctgggtgacatcgccgctcgcgacctgatctgcgctcagaagttcaacggcctgaccgtgctgccacctctgctgactgacgaaatgatcgcccagtacacttccgccctgctggctggaaccatcacttctggttggaccttcggtgctggtgctgctctgcagatccctttcgctatgcagatggcctacaggttcaacggaatcggtgtcacccagaacgtgctgtacgagaaccagaagctgatcgctaaccagttcaactccgccatcggcaagatccaggactccctgagctctactgccagcgctctgggaaagctgcaggacgtcgtgaaccacaacgcccaggctctgaacaccctggtcaagcagctgtcatccaagttcggagctatcagctctgtgctgaacgacatcctctcccgcctggaccctcctgaggctgaagtccagatcgacaggctgatcactggtagactgcagtctctgcagacctacgtgactcagcagctgatccgcgccgctgaaatccgtgcctcagctaacctggccgctaccaagatgtctgagtgcgtcctgggccagagcaagagggtggacttctgcggcaagggataccacctgatgtctttccctcagtcagctccccacggagtcgtgttcctgcacgtcacctacgtgccagcccaggagaagaacttcaccactgcccctgctatctgccacgacggcaaggctcacttcccccgtgaaggagtcttcgtgtccaacggcacccactggttcgtcactcagaggaacttctacgagccacagatcatcaccactgacaacactttcgtgagcggcaactgcgacgtggtcatcggtatcgtcaacaacaccgtgtacgaccccctgcagccagagctggactccttcaaggaagagctggacaagtacttcaagaaccacaccagcccagacgtcgacctgggcgacatctctggaatcaacgcttcagtcgtgaacatccagaaggagatcgaccgtctgaacgaagtggccaagaacctgaacgaatctctgatcgacctgcaggagctgggaaagtacgaacagtacatcaagtggccttggtacatctggctgggtttcatcgctggcctcatcgctatcgtgatggtgaccatcatgctgtgctgcatgacttcctgctgcagctgcctgaagggctgctgctcttgcggatcatgctgcaagttcgacgaggacgactcagaacccgtcctgaagggcgtgaagctgcactacacctaa

SEQ ID NO: 199 - DNA, 3807 bp, synthetic construct
  source 1..3807: mol_type = other DNA
atgttcggtttcctggtgctgctgcctctggtctccagccagtgcgtgaacctgatcaccaggactcagtcctacaccaacagcttcactagaggtgtgtactaccctgacaaggtcttccgctcttcagtgctgcactctactcaggacctgttcctgcccttcttctcaaacgtcacctggttccacgccatctccggcaccaacggcactaagagattcgacaacccagtgctgcctttcaacgacggcgtctacttcgcttctaccgagaagtcaaacatcatccgcggatggatcttcggcaccactctggactccaagactcagagcctgctgatcgtcaacaacgccaccaacgtggtcatcaaggtgtgcgaattccagttctgcaacgacccattcctggacgtgtactaccacaagaacaacaagtcttggatggagtcagaattcagagtctactccagcgctaacaactgcactttcgagtacgtgtctcagcctttcctgatggacctggaaggaaagcagggtaacttcaagaacctgcgtgagttcgtcttcaagaacatcgacggttacttcaagatttactctaagcacaccccaatcaacctgggtagggacctgcctcagggcttctcagctctggagccactggtggacctgcctatcggcatcaacatcaccaggttccagactctgctggctctgcacagaagctacctgactccaggagactcatcttctggatggactgctggagctgctgcttactacgtgggttacctgcagcctcgcaccttcctgctgaagtacaacgaaaacggcaccatcactgacgccgtcgactgcgctctggaccctctgtctgaaaccaagtgcactctgaagtcattcaccgtggagaagggcatctaccagacttccaacttccgcgtgcagcccaccgaaagcatcgtccgtttccctaacatcactaacctgtgccccttcgacgaggtcttcaacgccacccgtttcgcttctgtgtacgcctggaaccgcaagcgtatctctaactgcgtcgccgactactcagtgctgtacaacttcgctcccttcttcgccttcaagtgctacggagtgtcaccaactaagctgaacgacctgtgcttcaccaacgtctacgctgactctttcgtgatcaggggtaacgaggtctcacagatcgctccaggccagactggaaacatcgccgactacaactacaagctgcctgacgacttcaccggttgcgtcatcgcttggaactccaacaacctggacagcaaagtgggtggcaactacaactaccgttacaggctgttcagaaagtccaacctgaagcccttcgagcgtgacatcagcactgaaatctaccaggctggtaacaagccatgcaacggtgtcgccggcgtcaactgctacttccccctgcagtcctacggcttccgtccaacctacggtgtgggccaccagccttacagggtggtcgtgctgtccttcgaactcctccacgctccagctactgtgtgcggaccaaagaagagcaccaacctggtcaagaacaagtgcgtgaacttcaacttcaacggtctgaccggaactggtgtcctgaccgagtctaacaagaagttcctgcccttccagcagttcggtcgtgacatcgctgacactaccgacgccgtgagggacccccagaccctggaaatcctggacatcactccatgctctttcggaggtgtctcagtgatcactccaggaaccaacacttcaaaccaggtcgctgtgctgtaccagggtgtcaactgcaccgaagtccctgtggccatccacgctgaccagctgacccccacttggagagtgtacagcaccgtgtctaacgtcttccagactcgcgctggttgcctgatcggcgccgagtacgtgaacaactcttacgaatgcgacatccccatcggcgctggaatctgcgcctcataccagacccagactaagtcccaccagcaggctcagagcgtcgcctcacagtccatcatcgcttacaccatgtctctgggcgctgaaaactcagtggcctactcaaacaactccatcgccatccctaccaacttcactatctccgtgaccactgagatcctgcccgtctccatgaccaagactagcgtggactgcactatgtacatctgcggagactccaccgaatgcagcaacctgctgctgcagtacggtagcttctgcacccagctgaagcgtgctctgactggcatcgccgtggagcaggacaagaacactcaggaagtcttcgctcaggtgaagcaaatctacaagacccctcccatcaagtacttcggcggattcaacttctcccagatcctgcctgaccccagcaagccatctaagagatcattcatcgaggacctgctgttcaacaaggtcactctggccgacgctggtttcatcaagcagtacggagactgcctgggtgacatcgccgctcgcgacctgatctgcgctcagaagttcaacggcctgaccgtgctgccacctctgctgactgacgaaatgatcgcccagtacacttccgccctgctggctggaaccatcacttctggttggaccttcggtgctggtgctgctctgcagatccctttcgctatgcagatggcctacaggttcaacggaatcggtgtcacccagaacgtgctgtacgagaaccagaagctgatcgctaaccagttcaactccgccatcggcaagatccaggactccctgagctctactgccagcgctctgggaaagctgcaggacgtcgtgaaccacaacgcccaggctctgaacaccctggtcaagcagctgtcatccaagttcggagctatcagctctgtgctgaacgacatcctctcccgcctggaccctcctgaggctgaagtccagatcgacaggctgatcactggtagactgcagtctctgcagacctacgtgactcagcagctgatccgcgccgctgaaatccgtgcctcagctaacctggccgctaccaagatgtctgagtgcgtcctgggccagagcaagagggtggacttctgcggcaagggataccacctgatgtctttccctcagtcagctccccacggagtcgtgttcctgcacgtcacctacgtgccagcccaggagaagaacttcaccactgcccctgctatctgccacgacggcaaggctcacttcccccgtgaaggagtcttcgtgtccaacggcacccactggttcgtcactcagaggaacttctacgagccacagatcatcaccactgacaacactttcgtgagcggcaactgcgacgtggtcatcggtatcgtcaacaacaccgtgtacgaccccctgcagccagagctggactccttcaaggaagagctggacaagtacttcaagaaccacaccagcccagacgtcgacctgggcgacatctctggaatcaacgcttcagtcgtgaacatccagaaggagatcgaccgtctgaacgaagtggccaagaacctgaacgaatctctgatcgacctgcaggagctgggaaagtacgaacagtacatcaagtggccttggtacatctggctgggtttcatcgctggcctcatcgctatcgtgatggtgaccatcatgctgtgctgcatgacttcctgctgcagctgcctgaagggctgctgctcttgcggatcatgctgcaagttcgacgaggacgactcagaacccgtcctgaagggcgtgaagctgcactacacctaa

SEQ ID NO: 200 - protein, 1270 aa, synthetic construct
MFVFLVLLPLVSSQCVNLITRTQSYTNSFTRGVYYPDKVFRSSVLHSTQDLFLPFFSNVTWFHAIHVSGTNGTKRFDNPVLPFNDGVYFASTEKSNIIRGWIFGTTLDSKTQSLLIVNNATNVVIKVCEFQFCNDPFLDVYYHKNNKSWMESEFRVYSSANNCTFEYVSQPFLMDLEGKQGNFKNLREFVFKNIDGYFKIYSKHTPINLGRDLPQGFSALEPLVDLPIGINITRFQTLLALHRSYLTPGDSSSGWTAGAAAYYVGYLQPRTFLLKYNENGTITDAVDCALDPLSETKCTLKSFTVEKGIYQTSNFRVQPTESIVRFPNITNLCPFDEVFNATRFASVYAWNRKRISNCVADYSVLYNFAPFFAFKCYGVSPTKLNDLCFTNVYADSFVIRGNEVSQIAPGQTGNIADYNYKLPDDFTGCVIAWNSNKLDSKVGGNYNYQYRLFRKSNLKPFERDISTEIYQAGNKPCNGVAGFNCYFPLRSYGFRPTYGVGHQPYRVVVLSFELLHAPATVCGPKKSTNLVKNKCVNFNFNGLTGTGVLTESNKKFLPFQQFGRDIADTTDAVRDPQTLEILDITPCSFGGVSVITPGTNTSNQVAVLYQGVNCTEVPVAIHADQLTPTWRVYSTGSNVFQTRAGCLIGAEYVNNSYECDIPIGAGICASYQTQTKSHQQAQSVASQSIIAYTMSLGAENLVAYSNNSIAIPTNFTISVTTEILPVSMTKTSVDCTMYICGDSTECSNLLLQYGSFCTQLKRALTGIAVEQDKNTQEVFAQVKQIYKTPPIKYFGGFNFSQILPDPSKPSKRSFIEDLLFNKVTLADAGFIKQYGDCLGDIAARDLICAQKFNGLTVLPPLLTDEMIAQYTSALLAGTITSGWTFGAGAALQIPFAMQMAYRFNGIGVTQNVLYENQKLIANQFNSAIGKIQDSLSSTASALGKLQDVVNHNAQALNTLVKQLSSKFGAISSVLNDILSRLDPPEAEVQIDRLITGRLQSLQTYVTQQLIRAAEIRASANLAATKMSECVLGQSKRVDFCGKGYHLMSFPQSAPHGVVFLHVTYVPAQEKNFTTAPAICHDGKAHFPREGVFVSNGTHWFVTQRNFYEPQIITTDNTFVSGNCDVVIGIVNNTVYDPLQPELDSFKEELDKYFKNHTSPDVDLGDISGINASVVNIQKEIDRLNEVAKNLNESLIDLQELGKYEQYIKWPWYIWLGFIAGLIAIVMVTIMLCCMTSCCSCLKGCCSCGSCCKFDEDDSEPVLKGVKLHYT

SEQ ID NO: 201 - DNA, 3813 bp, synthetic construct
  source 1..3813: mol_type = other DNA
atgttcgtcttcctggtgctgctgcctctggtctccagccagtgcgtgaacctgatcaccaggactcagtcctacaccaacagcttcactagaggtgtgtactaccctgacaaggtcttccgctcttcagtgctgcactctactcaggacctgttcctgcccttcttctcaaacgtcacctggttccacgccatccacgtgtccggcaccaacggcactaagagattcgacaacccagtgctgcctttcaacgacggcgtctacttcgcttctaccgagaagtcaaacatcatccgcggatggatcttcggcaccactctggactccaagactcagagcctgctgatcgtcaacaacgccaccaacgtggtcatcaaggtgtgcgaattccagttctgcaacgacccattcctggacgtgtactaccacaagaacaacaagtcttggatggagtcagaattcagagtctactccagcgctaacaactgcactttcgagtacgtgtctcagcctttcctgatggacctggaaggaaagcagggtaacttcaagaacctgcgtgagttcgtcttcaagaacatcgacggttacttcaagatttactctaagcacaccccaatcaacctgggtagggacctgcctcagggcttctcagctctggagccactggtggacctgcctatcggcatcaacatcaccaggttccagactctgctggctctgcacagaagctacctgactccaggagactcatcttctggatggactgctggagctgctgcttactacgtgggttacctgcagcctcgcaccttcctgctgaagtacaacgaaaacggcaccatcactgacgccgtcgactgcgctctggaccctctgtctgaaaccaagtgcactctgaagtcattcaccgtggagaagggcatctaccagacttccaacttccgcgtgcagcccaccgaaagcatcgtccgtttccctaacatcactaacctgtgccccttcgacgaggtcttcaacgccacccgtttcgcttctgtgtacgcctggaaccgcaagcgtatctctaactgcgtcgccgactactcagtgctgtacaacttcgctcccttcttcgccttcaagtgctacggagtgtcaccaactaagctgaacgacctgtgcttcaccaacgtctacgctgactctttcgtgatcaggggtaacgaggtctcacagatcgctccaggccagactggaaacatcgccgactacaactacaagctgcctgacgacttcaccggttgcgtcatcgcttggaactccaacaagctggacagcaaagtgggtggcaactacaactaccagtacaggctgttcagaaagtccaacctgaagcccttcgagcgtgacatcagcactgaaatctaccaggctggtaacaagccatgcaacggtgtcgccggcttcaactgctacttccccctgcgctcctacggcttccgtccaacctacggtgtgggccaccagccttacagggtggtcgtgctgtccttcgaactcctccacgctccagctactgtgtgcggaccaaagaagagcaccaacctggtcaagaacaagtgcgtgaacttcaacttcaacggtctgaccggaactggtgtcctgaccgagtctaacaagaagttcctgcccttccagcagttcggtcgtgacatcgctgacactaccgacgccgtgagggacccccagaccctggaaatcctggacatcactccatgctctttcggaggtgtctcagtgatcactccaggaaccaacacttcaaaccaggtcgctgtgctgtaccagggtgtcaactgcaccgaagtccctgtggccatccacgctgaccagctgacccccacttggagagtgtacagcaccggctctaacgtcttccagactcgcgctggttgcctgatcggcgccgagtacgtgaacaactcttacgaatgcgacatccccatcggcgctggaatctgcgcctcataccagacccagactaagtcccaccagcaggctcagagcgtcgcctcacagtccatcatcgcttacaccatgtctctgggcgctgaaaacctggtggcctactcaaacaactccatcgccatccctaccaacttcactatctccgtgaccactgagatcctgcccgtctccatgaccaagactagcgtggactgcactatgtacatctgcggagactccaccgaatgcagcaacctgctgctgcagtacggtagcttctgcacccagctgaagcgtgctctgactggcatcgccgtggagcaggacaagaacactcaggaagtcttcgctcaggtgaagcaaatctacaagacccctcccatcaagtacttcggcggattcaacttctcccagatcctgcctgaccccagcaagccatctaagagatcattcatcgaggacctgctgttcaacaaggtcactctggccgacgctggtttcatcaagcagtacggagactgcctgggtgacatcgccgctcgcgacctgatctgcgctcagaagttcaacggcctgaccgtgctgccacctctgctgactgacgaaatgatcgcccagtacacttccgccctgctggctggaaccatcacttctggttggaccttcggtgctggtgctgctctgcagatccctttcgctatgcagatggcctacaggttcaacggaatcggtgtcacccagaacgtgctgtacgagaaccagaagctgatcgctaaccagttcaactccgccatcggcaagatccaggactccctgagctctactgccagcgctctgggaaagctgcaggacgtcgtgaaccacaacgcccaggctctgaacaccctggtcaagcagctgtcatccaagttcggagctatcagctctgtgctgaacgacatcctctcccgcctggaccctcctgaggctgaagtccagatcgacaggctgatcactggtagactgcagtctctgcagacctacgtgactcagcagctgatccgcgccgctgaaatccgtgcctcagctaacctggccgctaccaagatgtctgagtgcgtcctgggccagagcaagagggtggacttctgcggcaagggataccacctgatgtctttccctcagtcagctccccacggagtcgtgttcctgcacgtcacctacgtgccagcccaggagaagaacttcaccactgcccctgctatctgccacgacggcaaggctcacttcccccgtgaaggagtcttcgtgtccaacggcacccactggttcgtcactcagaggaacttctacgagccacagatcatcaccactgacaacactttcgtgagcggcaactgcgacgtggtcatcggtatcgtcaacaacaccgtgtacgaccccctgcagccagagctggactccttcaaggaagagctggacaagtacttcaagaaccacaccagcccagacgtcgacctgggcgacatctctggaatcaacgcttcagtcgtgaacatccagaaggagatcgaccgtctgaacgaagtggccaagaacctgaacgaatctctgatcgacctgcaggagctgggaaagtacgaacagtacatcaagtggccttggtacatctggctgggtttcatcgctggcctcatcgctatcgtgatggtgaccatcatgctgtgctgcatgacttcctgctgcagctgcctgaagggctgctgctcttgcggatcatgctgcaagttcgacgaggacgactcagaacccgtcctgaagggcgtgaagctgcactacacctaa

SEQ ID NO: 202 - DNA, 3813 bp, synthetic construct
  source 1..3813: mol_type = other DNA
atgttcgtcttcctggtgctgctgcctctggtctccagccagtgcgtgaacctgatcaccaggactcagtcctacaccaacagcttcactagaggtgtgtactaccctgacaaggtcttccgctcttcagtgctgcactctactcaggacctgttcctgcccttcttctcaaacgtcacctggttccacgccatccacgtgtccggcaccaacggcactaagagattcgacaacccagtgctgcctttcaacgacggcgtctacttcgcttctaccgagaagtcaaacatcatccgcggatggatcttcggcaccactctggactccaagactcagagcctgctgatcgtcaacaacgccaccaacgtggtcatcaaggtgtgcgaattccagttctgcaacgacccattcctggacgtgtactaccacaagaacaacaagtcttggatggagtcagaattcagagtctactccagcgctaacaactgcactttcgagtacgtgtctcagcctttcctgatggacctggaaggaaagcagggtaacttcaagaacctgcgtgagttcgtcttcaagaacatcgacggttacttcaagatttactctaagcacaccccaatcaacctgggtagggacctgcctcagggcttctcagctctggagccactggtggacctgcctatcggcatcaacatcaccaggttccagactctgctggctctgcacagaagctacctgactccaggagactcatcttctggatggactgctggagctgctgcttactacgtgggttacctgcagcctcgcaccttcctgctgaagtacaacgaaaacggcaccatcactgacgccgtcgactgcgctctggaccctctgtctgaaaccaagtgcactctgaagtcattcaccgtggagaagggcatctaccagacttccaacttccgcgtgcagcccaccgaaagcatcgtccgtttccctaacatcactaacctgtgccccttcgacgaggtcttcaacgccacccgtttcgcttctgtgtacgcctggaaccgcaagcgtatctctaactgcgtcgccgactactcagtgctgtacaacttcgctcccttcttcgccttcaagtgctacggagtgtcaccaactaagctgaacgacctgtgcttcaccaacgtctacgctgactctttcgtgatcaggggtaacgaggtccgtcagatcgctccaggccagactggaaacatcgccgactacaactacaagctgcctgacgacttcaccggttgcgtcatcgcttggaactccaacaagctggacagcaaagtgggtggcaactacaactaccagtacaggctgttcagaaagtccaacctgaagcccttcgagcgtgacatcagcactgaaatctaccaggctggtaacaagccatgcaacggtgtcgccggcttcaactgctacttccccctgcgctcctacggcttccgtccaacctacggtgtgggccaccagccttacagggtggtcgtgctgtccttcgaactcctccacgctccagctactgtgtgcggaccaaagaagagcaccaacctggtcaagaacaagtgcgtgaacttcaacttcaacggtctgaccggaactggtgtcctgaccgagtctaacaagaagttcctgcccttccagcagttcggtcgtgacatcgctgacactaccgacgccgtgagggacccccagaccctggaaatcctggacatcactccatgctctttcggaggtgtctcagtgatcactccaggaaccaacacttcaaaccaggtcgctgtgctgtaccagggtgtcaactgcaccgaagtccctgtggccatccacgctgaccagctgacccccacttggagagtgtacagcaccggctctaacgtcttccagactcgcgctggttgcctgatcggcgccgagtacgtgaacaactcttacgaatgcgacatccccatcggcgctggaatctgcgcctcataccagacccagactaagtcccaccagcaggctcagagcgtcgcctcacagtccatcatcgcttacaccatgtctctgggcgctgaaaacctggtggcctactcaaacaactccatcgccatccctaccaacttcactatctccgtgaccactgagatcctgcccgtctccatgaccaagactagcgtggactgcactatgtacatctgcggagactccaccgaatgcagcaacctgctgctgcagtacggtagcttctgcacccagctgaagcgtgctctgactggcatcgccgtggagcaggacaagaacactcaggaagtcttcgctcaggtgaagcaaatctacaagacccctcccatcaagtacttcggcggattcaacttctcccagatcctgcctgaccccagcaagccatctaagagatcattcatcgaggacctgctgttcaacaaggtcactctggccgacgctggtttcatcaagcagtacggagactgcctgggtgacatcgccgctcgcgacctgatctgcgctcagaagttcaacggcctgaccgtgctgccacctctgctgactgacgaaatgatcgcccagtacacttccgccctgctggctggaaccatcacttctggttggaccttcggtgctggtgctgctctgcagatccctttcgctatgcagatggcctacaggttcaacggaatcggtgtcacccagaacgtgctgtacgagaaccagaagctgatcgctaaccagttcaactccgccatcggcaagatccaggactccctgagctctactgccagcgctctgggaaagctgcaggacgtcgtgaaccacaacgcccaggctctgaacaccctggtcaagcagctgtcatccaagttcggagctatcagctctgtgctgaacgacatcctctcccgcctggaccctcctgaggctgaagtccagatcgacaggctgatcactggtagactgcagtctctgcagacctacgtgactcagcagctgatccgcgccgctgaaatccgtgcctcagctaacctggccgctaccaagatgtctgagtgcgtcctgggccagagcaagagggtggacttctgcggcaagggataccacctgatgtctttccctcagtcagctccccacggagtcgtgttcctgcacgtcacctacgtgccagcccaggagaagaacttcaccactgcccctgctatctgccacgacggcaaggctcacttcccccgtgaaggagtcttcgtgtccaacggcacccactggttcgtcactcagaggaacttctacgagccacagatcatcaccactgacaacactttcgtgagcggcaactgcgacgtggtcatcggtatcgtcaacaacaccgtgtacgaccccctgcagccagagctggactccttcaaggaagagctggacaagtacttcaagaaccacaccagcccagacgtcgacctgggcgacatctctggaatcaacgcttcagtcgtgaacatccagaaggagatcgaccgtctgaacgaagtggccaagaacctgaacgaatctctgatcgacctgcaggagctgggaaagtacgaacagtacatcaagtggccttggtacatctggctgggtttcatcgctggcctcatcgctatcgtgatggtgaccatcatgctgtgctgcatgacttcctgctgcagctgcctgaagggctgctgctcttgcggatcatgctgcaagttcgacgaggacgactcagaacccgtcctgaagggcgtgaagctgcactacacctaa

SEQ ID NO: 203 - protein, 1268 aa, synthetic construct
MFVFLVLLPLVSSQCVNLITRTQSYTNSFTRGVYYPDKVFRSSVLHSTQDLFLPFFSNVTWFHAISGTNGTKRFDNPVLPFNDGVYFASTEKSNIIRGWIFGTTLDSKTQSLLIVNNATNVVIKVCEFQFCNDPFLDVYYHKNNKSWMESEFRVYSSANNCTFEYVSQPFLMDLEGKQGNFKNLREFVFKNIDGYFKIYSKHTPINLGRDLPQGFSALEPLVDLPIGINITRFQTLLALHRSYLTPGDSSSGWTAGAAAYYVGYLQPRTFLLKYNENGTITDAVDCALDPLSETKCTLKSFTVEKGIYQTSNFRVQPTESIVRFPNITNLCPFDEVFNATTFASVYAWNRKRISNCVADYSVLYNFAPFFAFKCYGVSPTKLNDLCFTNVYADSFVIRGNEVSQIAPGQTGNIADYNYKLPDDFTGCVIAWNSNKLDSKVGGNYNYRYRLFRKSNLKPFERDISTEIYQAGNKPCNGVAGVNCYFPLQSYGFRPTYGVGHQPYRVVVLSFELLHAPATVCGPKKSTNLVKNKCVNFNFNGLTGTGVLTESNKKFLPFQQFGRDIADTTDAVRDPQTLEILDITPCSFGGVSVITPGTNTSNQVAVLYQGVNCTEVPVAIHADQLTPTWRVYSTGSNVFQTRAGCLIGAEYVNSSYECDIPIGAGICASYQTQTKSHQQAQSVASQSIIAYTMSLGAENSVAYSNNSIAIPTNFTISVTTEILPVSMTKTSVDCTMYICGDSTECSNLLLQYGSFCTQLKRALTGIAVEQDKNTQEVFAQVKQIYKTPPIKYFGGFNFSQILPDPSKPSKRSFIEDLLFNKVTLADAGFIKQYGDCLGDIAARDLICAQKFNGLTVLPPLLTDEMIAQYTSALLAGTITSGWTFGAGAALQIPFAMQMAYRFNGIGVTQNVLYENQKLIANQFNSAIGKIQDSLSSTASALGKLQDVVNHNAQALNTLVKQLSSKFGAISSVLNDILSRLDPPEAEVQIDRLITGRLQSLQTYVTQQLIRAAEIRASANLAATKMSECVLGQSKRVDFCGKGYHLMSFPQSAPHGVVFLHVTYVPAQEKNFTTAPAICHDGKAHFPREGVFVSNGTHWFVTQRNFYEPQIITTDNTFVSGNCDVVIGIVNNTVYDPLQPELDSFKEELDKYFKNHTSPDVDLGDISGINASVVNIQKEIDRLNEVAKNLNESLIDLQELGKYEQYIKWPWYIWLGFIAGLIAIVMVTIMLCCMTSCCSCLKGCCSCGSCCKFDEDDSEPVLKGVKLHYT

SEQ ID NO: 204 - DNA, 3807 bp, synthetic construct
  source 1..3807: mol_type = other DNA
atgttcgtcttcctggtgctgctgcctctggtctccagccagtgcgtgaacctgatcaccaggactcagtcctacaccaacagcttcactagaggtgtgtactaccctgacaaggtcttccgctcttcagtgctgcactctactcaggacctgttcctgcccttcttctcaaacgtcacctggttccacgccatctccggcaccaacggcactaagagattcgacaacccagtgctgcctttcaacgacggcgtctacttcgcttctaccgagaagtcaaacatcatccgcggatggatcttcggcaccactctggactccaagactcagagcctgctgatcgtcaacaacgccaccaacgtggtcatcaaggtgtgcgaattccagttctgcaacgacccattcctggacgtgtactaccacaagaacaacaagtcttggatggagtcagaattcagagtctactccagcgctaacaactgcactttcgagtacgtgtctcagcctttcctgatggacctggaaggaaagcagggtaacttcaagaacctgcgtgagttcgtcttcaagaacatcgacggttacttcaagatttactctaagcacaccccaatcaacctgggtagggacctgcctcagggcttctcagctctggagccactggtggacctgcctatcggcatcaacatcaccaggttccagactctgctggctctgcacagaagctacctgactccaggagactcatcttctggatggactgctggagctgctgcttactacgtgggttacctgcagcctcgcaccttcctgctgaagtacaacgaaaacggcaccatcactgacgccgtcgactgcgctctggaccctctgtctgaaaccaagtgcactctgaagtcattcaccgtggagaagggcatctaccagacttccaacttccgcgtgcagcccaccgaaagcatcgtccgtttccctaacatcactaacctgtgccccttcgacgaggtcttcaacgccaccaccttcgcttctgtgtacgcctggaaccgcaagcgtatctctaactgcgtcgccgactactcagtgctgtacaacttcgctcccttcttcgccttcaagtgctacggagtgtcaccaactaagctgaacgacctgtgcttcaccaacgtctacgctgactctttcgtgatcaggggtaacgaggtctcacagatcgctccaggccagactggaaacatcgccgactacaactacaagctgcctgacgacttcaccggttgcgtcatcgcttggaactccaacaagctggacagcaaagtgggtggcaactacaactaccgttacaggctgttcagaaagtccaacctgaagcccttcgagcgtgacatcagcactgaaatctaccaggctggtaacaagccatgcaacggtgtcgccggcgtcaactgctacttccccctgcagtcctacggcttccgtccaacctacggtgtgggccaccagccttacagggtggtcgtgctgtccttcgaactcctccacgctccagctactgtgtgcggaccaaagaagagcaccaacctggtcaagaacaagtgcgtgaacttcaacttcaacggtctgaccggaactggtgtcctgaccgagtctaacaagaagttcctgcccttccagcagttcggtcgtgacatcgctgacactaccgacgccgtgagggacccccagaccctggaaatcctggacatcactccatgctctttcggaggtgtctcagtgatcactccaggaaccaacacttcaaaccaggtcgctgtgctgtaccagggtgtcaactgcaccgaagtccctgtggccatccacgctgaccagctgacccccacttggagagtgtacagcaccggctctaacgtcttccagactcgcgctggttgcctgatcggcgccgagtacgtgaactcctcttacgaatgcgacatccccatcggcgctggaatctgcgcctcataccagacccagactaagtcccaccagcaggctcagagcgtcgcctcacagtccatcatcgcttacaccatgtctctgggcgctgaaaactcagtggcctactcaaacaactccatcgccatccctaccaacttcactatctccgtgaccactgagatcctgcccgtctccatgaccaagactagcgtggactgcactatgtacatctgcggagactccaccgaatgcagcaacctgctgctgcagtacggtagcttctgcacccagctgaagcgtgctctgactggcatcgccgtggagcaggacaagaacactcaggaagtcttcgctcaggtgaagcaaatctacaagacccctcccatcaagtacttcggcggattcaacttctcccagatcctgcctgaccccagcaagccatctaagagatcattcatcgaggacctgctgttcaacaaggtcactctggccgacgctggtttcatcaagcagtacggagactgcctgggtgacatcgccgctcgcgacctgatctgcgctcagaagttcaacggcctgaccgtgctgccacctctgctgactgacgaaatgatcgcccagtacacttccgccctgctggctggaaccatcacttctggttggaccttcggtgctggtgctgctctgcagatccctttcgctatgcagatggcctacaggttcaacggaatcggtgtcacccagaacgtgctgtacgagaaccagaagctgatcgctaaccagttcaactccgccatcggcaagatccaggactccctgagctctactgccagcgctctgggaaagctgcaggacgtcgtgaaccacaacgcccaggctctgaacaccctggtcaagcagctgtcatccaagttcggagctatcagctctgtgctgaacgacatcctctcccgcctggaccctcctgaggctgaagtccagatcgacaggctgatcactggtagactgcagtctctgcagacctacgtgactcagcagctgatccgcgccgctgaaatccgtgcctcagctaacctggccgctaccaagatgtctgagtgcgtcctgggccagagcaagagggtggacttctgcggcaagggataccacctgatgtctttccctcagtcagctccccacggagtcgtgttcctgcacgtcacctacgtgccagcccaggagaagaacttcaccactgcccctgctatctgccacgacggcaaggctcacttcccccgtgaaggagtcttcgtgtccaacggcacccactggttcgtcactcagaggaacttctacgagccacagatcatcaccactgacaacactttcgtgagcggcaactgcgacgtggtcatcggtatcgtcaacaacaccgtgtacgaccccctgcagccagagctggactccttcaaggaagagctggacaagtacttcaagaaccacaccagcccagacgtcgacctgggcgacatctctggaatcaacgcttcagtcgtgaacatccagaaggagatcgaccgtctgaacgaagtggccaagaacctgaacgaatctctgatcgacctgcaggagctgggaaagtacgaacagtacatcaagtggccttggtacatctggctgggtttcatcgctggcctcatcgctatcgtgatggtgaccatcatgctgtgctgcatgacttcctgctgcagctgcctgaagggctgctgctcttgcggatcatgctgcaagttcgacgaggacgactcagaacccgtcctgaagggcgtgaagctgcactacacctaa

SEQ ID NO: 205 - protein, 1270 aa, synthetic construct
MFVFLVLLPLVSSQCVNLITRTQSYTNSFTRGVYYPDKVFRSSVLHSTQDLFLPFFSNVTWFHAIHVSGTNGTKRFDNPVLPFNDGVYFASTEKSNIIRGWIFGTTLDSKTQSLLIVNNATNVVIKVCEFQFCNDPFLDVYYHENNKSRMESELRVYSSANNCTFEYVSQPFLMDLEGKQGNFKNLREFVFKNIDGYFKIYSKHTPVNLGRDLPQGFSALEPLVDLPIGINITRFQTLLALHRSYLTPGDSSSSWTAGAAAYYVGYLQPRTFLLKYNENGTITDAVDCALDPLSETKCTLKSFTVEKGIYQTSNFRVQPTESIVRFPNITNLCPFHEVFNATRFASVYAWNRKRISNCVADYSVLYNFAPFFAFKCYGVSPTKLNDLCFTNVYADSFVIRGNEVSQIAPGQTGNIADYNYKLPDDFTGCVIAWNSNKLDSKVSGNYNYLYRLFRKSKLKPFERDISTEIYQAGNKPCNGVAGFNCYFPLQSYGFRPTYGVGHQPYRVVVLSFELLHAPATVCGPKKSTNLVKNKCVNFNFNGLTGTGVLTESNKKFLPFQQFGRDIADTTDAVRDPQTLEILDITPCSFGGVSVITPGTNTSNQVAVLYQGVNCTEVPVAIHADQLTPTWRVYSTGSNVFQTRAGCLIGAEYVNNSYECDIPIGAGICASYQTQTKSHQQAQSVASQSIIAYTMSLGAENSVAYSNNSIAIPTNFTISVTTEILPVSMTKTSVDCTMYICGDSTECSNLLLQYGSFCTQLKRALTGIAVEQDKNTQEVFAQVKQIYKTPPIKYFGGFNFSQILPDPSKPSKRSFIEDLLFNKVTLADAGFIKQYGDCLGDIAARDLICAQKFNGLTVLPPLLTDEMIAQYTSALLAGTITSGWTFGAGAALQIPFAMQMAYRFNGIGVTQNVLYENQKLIANQFNSAIGKIQDSLSSTASALGKLQDVVNHNAQALNTLVKQLSSKFGAISSVLNDILSRLDPPEAEVQIDRLITGRLQSLQTYVTQQLIRAAEIRASANLAATKMSECVLGQSKRVDFCGKGYHLMSFPQSAPHGVVFLHVTYVPAQEKNFTTAPAICHDGKAHFPREGVFVSNGTHWFVTQRNFYEPQIITTDNTFVSGNCDVVIGIVNNTVYDPLQPELDSFKEELDKYFKNHTSPDVDLGDISGINASVVNIQKEIDRLNEVAKNLNESLIDLQELGKYEQYIKWPWYIWLGFIAGLIAIVMVTIMLCCMTSCCSCLKGCCSCGSCCKFDEDDSEPVLKGVKLHYT

SEQ ID NO: 206 - DNA, 3813 bp, synthetic construct
  source 1..3813: mol_type = other DNA
atgttcgtcttcctggtgctgctgcctctggtctccagccagtgcgtgaacctgatcaccaggactcagtcctacaccaacagcttcactagaggtgtgtactaccctgacaaggtcttccgctcttcagtgctgcactctactcaggacctgttcctgcccttcttctcaaacgtcacctggttccacgccatccacgtgtccggcaccaacggcactaagagattcgacaacccagtgctgcctttcaacgacggcgtctacttcgcttctaccgagaagtcaaacatcatccgcggatggatcttcggcaccactctggactccaagactcagagcctgctgatcgtcaacaacgccaccaacgtggtcatcaaggtgtgcgaattccagttctgcaacgacccattcctggacgtgtactaccacgagaacaacaagtctcgcatggagtcagaattgagagtctactccagcgctaacaactgcactttcgagtacgtgtctcagcctttcctgatggacctggaaggaaagcagggtaacttcaagaacctgcgtgagttcgtcttcaagaacatcgacggttacttcaagatttactctaagcacaccccagtgaacctgggtagggacctgcctcagggcttctcagctctggagccactggtggacctgcctatcggcatcaacatcaccaggttccagactctgctggctctgcacagaagctacctgactccaggagactcatcttctagctggactgctggagctgctgcttactacgtgggttacctgcagcctcgcaccttcctgctgaagtacaacgaaaacggcaccatcactgacgccgtcgactgcgctctggaccctctgtctgaaaccaagtgcactctgaagtcattcaccgtggagaagggcatctaccagacttccaacttccgcgtgcagcccaccgaaagcatcgtccgtttccctaacatcactaacctgtgccccttccacgaggtcttcaacgccacccgtttcgcttctgtgtacgcctggaaccgcaagcgtatctctaactgcgtcgccgactactcagtgctgtacaacttcgctcccttcttcgccttcaagtgctacggagtgtcaccaactaagctgaacgacctgtgcttcaccaacgtctacgctgactctttcgtgatcaggggtaacgaggtctcacagatcgctccaggccagactggaaacatcgccgactacaactacaagctgcctgacgacttcaccggttgcgtcatcgcttggaactccaacaagctggacagcaaagtgagcggcaactacaactacttgtacaggctgttcagaaagtccaaactgaagcccttcgagcgtgacatcagcactgaaatctaccaggctggtaacaagccatgcaacggtgtcgccggctttaactgctacttccccctgcagtcctacggcttccgtccaacctacggtgtgggccaccagccttacagggtggtcgtgctgtccttcgaactcctccacgctccagctactgtgtgcggaccaaagaagagcaccaacctggtcaagaacaagtgcgtgaacttcaacttcaacggtctgaccggaactggtgtcctgaccgagtctaacaagaagttcctgcccttccagcagttcggtcgtgacatcgctgacactaccgacgccgtgagggacccccagaccctggaaatcctggacatcactccatgctctttcggaggtgtctcagtgatcactccaggaaccaacacttcaaaccaggtcgctgtgctgtaccagggtgtcaactgcaccgaagtccctgtggccatccacgctgaccagctgacccccacttggagagtgtacagcaccggctctaacgtcttccagactcgcgctggttgcctgatcggcgccgagtacgtgaacaactcttacgaatgcgacatccccatcggcgctggaatctgcgcctcataccagacccagactaagtcccaccagcaggctcagagcgtcgcctcacagtccatcatcgcttacaccatgtctctgggcgctgaaaactcagtggcctactcaaacaactccatcgccatccctaccaacttcactatctccgtgaccactgagatcctgcccgtctccatgaccaagactagcgtggactgcactatgtacatctgcggagactccaccgaatgcagcaacctgctgctgcagtacggtagcttctgcacccagctgaagcgtgctctgactggcatcgccgtggagcaggacaagaacactcaggaagtcttcgctcaggtgaagcaaatctacaagacccctcccatcaagtacttcggcggattcaacttctcccagatcctgcctgaccccagcaagccatctaagagatcattcatcgaggacctgctgttcaacaaggtcactctggccgacgctggtttcatcaagcagtacggagactgcctgggtgacatcgccgctcgcgacctgatctgcgctcagaagttcaacggcctgaccgtgctgccacctctgctgactgacgaaatgatcgcccagtacacttccgccctgctggctggaaccatcacttctggttggaccttcggtgctggtgctgctctgcagatccctttcgctatgcagatggcctacaggttcaacggaatcggtgtcacccagaacgtgctgtacgagaaccagaagctgatcgctaaccagttcaactccgccatcggcaagatccaggactccctgagctctactgccagcgctctgggaaagctgcaggacgtcgtgaaccacaacgcccaggctctgaacaccctggtcaagcagctgtcatccaagttcggagctatcagctctgtgctgaacgacatcctctcccgcctggaccctcctgaggctgaagtccagatcgacaggctgatcactggtagactgcagtctctgcagacctacgtgactcagcagctgatccgcgccgctgaaatccgtgcctcagctaacctggccgctaccaagatgtctgagtgcgtcctgggccagagcaagagggtggacttctgcggcaagggataccacctgatgtctttccctcagtcagctccccacggagtcgtgttcctgcacgtcacctacgtgccagcccaggagaagaacttcaccactgcccctgctatctgccacgacggcaaggctcacttcccccgtgaaggagtcttcgtgtccaacggcacccactggttcgtcactcagaggaacttctacgagccacagatcatcaccactgacaacactttcgtgagcggcaactgcgacgtggtcatcggtatcgtcaacaacaccgtgtacgaccccctgcagccagagctggactccttcaaggaagagctggacaagtacttcaagaaccacaccagcccagacgtcgacctgggcgacatctctggaatcaacgcttcagtcgtgaacatccagaaggagatcgaccgtctgaacgaagtggccaagaacctgaacgaatctctgatcgacctgcaggagctgggaaagtacgaacagtacatcaagtggccttggtacatctggctgggtttcatcgctggcctcatcgctatcgtgatggtgaccatcatgctgtgctgcatgacttcctgctgcagctgcctgaagggctgctgctcttgcggatcatgctgcaagttcgacgaggacgactcagaacccgtcctgaagggcgtgaagctgcactacacctaa

SEQ ID NO: 207 - protein, 1270 aa, synthetic construct; identical to SEQ ID NO: 160

SEQ ID NO: 208 - DNA, 3810 bp, synthetic construct
  source 1..3810: mol_type = other DNA
atgttcgtcttcctggtgctgctgcccctggtgtccagccagtgcgtgaacctgaccactaggactcagctgcctcccgcttacaccaactcattcactcgcggtgtgtactaccctgacaaggtcttccgttcttcagtgctgcactcaactcaggacctgttcctgcccttcttctccaacgtcacctggttccacgtcatctccggcaccaacggcactaagcgcttcgacaacccagtgctgcctttcaacgacggtgtctacttcgcttcaattgagaagtccaacatcatccgtggatggatcttcggcaccactctggacagcaagactcagtctctgctgatcgtcaacaacgccaccaacgtggtcatcaaggtctgcgaattccagttctgcaacgacccattcctggaccacaagaacaacaagtcatggatggagtccgaattccgcgtctactccagcgctaacaactgcactttcgagtacgtgtcccagcctttcctgatggacctggaaggaaagcagggtaacttcaagaacctgagggagttcgtgttcaagaacatcgacggatacttcaagatttacagcaagcacaccccaatcattgtgcgcgagccggaggacctgcctcagggtttctctgctctggagccactggtggacctgcctatcggcatcaacatcacccgcttccagactctgctggctctgcaccgttcctacctgactccaggcgactcatcttctggatggactgctggagctgctgcttactacgtgggctacctgcagcctcgcaccttcctgctgaagtacaacgaaaacggaaccatcactgacgccgtcgactgcgctctggaccctctgtcagaaaccaagtgcactctgaagtccttcaccgtggagaagggcatctaccagacttcaaacttcagggtgcagcccaccgaatccatcgtcagattccctaacatcactaacctgtgccccttcgacgaggtcttcaacgccacccgcttcgcttccgtgtacgcctggaacaggaagagaatctcaaactgcgtcgctgactactccgtgctgtacaaccttgccccgttctttaccttcaagtgctacggcgtgtcaccaactaagctgaacgacctgtgcttcaccaacgtctacgccgactccttcgtgatcaggggagacgaggtcagacagatcgctcctggccagactggaaatatcgccgactacaactacaagctgcccgacgacttcaccggttgcgtcatcgcttggaacagcaacaaactggactctaaagtgagtggcaactacaactacctgtaccgcctgttccgtaagtcaaacctgaagccattcgagagggacatcagcactgaaatctaccaggccggaaataaaccttgcaacggtgtcgcgggcttcaactgctacttccccctgaggtcctactctttccgaccaacttatggtgtgggccaccagccttacagagtggtcgtgctgagcttcgaactgctccacgctcctgctactgtgtgcggtccaaagaagtctaccaacctggtcaagaacaagtgcgtgaacttcaacttcaacggcctgaaaggaactggtgtcctgaccgagagcaacaagaagttcctgcccttccagcagttcggaagggacatcgctgacaccactgacgctgtgcgcgaccctcagaccctggaaatcctggacatcactccatgctcattcggaggtgtctccgtgatcacccctggcaccaacacttctaaccaggtcgctgtgctgtaccagggcgtcaactgcaccgaggtccctgtggccatccacgctgaccagctgacccccacttggcgcgtgtactccaccggcagcaacgtgttccagactcgtgctggttgcctgatcggcgccgagtacgtgaacaacagctacgaatgcgacatccccatcggcgctggaatctgcgcctcttaccagacccagactaagagccaccagcaggctcagtctgtggcctctcagtcaatcatcgcttacaccatgtcactgggcgctgaaaactccgtggcctactctaacaactcaatcgccatccccaccaacttcactatcagcgtgaccactgagatcctgccagtcagcatgaccaagacttctgtggactgcactatgtacatctgcggagacagcaccgaatgctctaacctgctgctgcagtacggctctttctgcacccagctgaagcgtgctctgactggaatcgccgtggagcaggacaagaacactcaggaagtcttcgctcaggtgaagcaaatctacaagaccccacctatcaagtacttcggcggattcaacttctcccagatcctgcctgacccctccaagccaagcaagcgctctttcatcgaggacctgctgttcaacaaggtcactctggccgacgctggattcatcaagcagtacggagactgcctgggtgacatcgccgctcgtgacctgatctgcgctcagaagttcaagggtctgaccgtgctgcccccactgctgactgacgaaatgatcgcccagtacactagcgccctgctggctggaaccatcacttctggttggaccttcggtgctggcgccgctctgcagatccctttcgctatgcagatggcctaccgtttcaacggaatcggtgtcacccagaacgtgctgtacgagaaccagaagctgatcgctaaccagttcaactcagccatcggaaagatccaggacagcctgagctctactgcctctgctctgggcaagctgcaggacgtcgtgaaccataacgcccaggctctgaacaccctggtcaagcagctgtcatccaagttcggtgctatcagctctgtgctgaacgacatcttctcccgcctggaccctcccgaggccgaagtgcagatcgaccgcctgatcactggccgtctgcagtcactgcagacctacgtgactcagcagctgatcagggccgctgaaatcagagcctccgctaacctggccgctaccaagatgagcgagtgcgtcctgggtcaatctaagcgtgtggacttctgcggcaagggataccacctgatgtcattccctcagtctgctccccacggtgtggtgttcctgcacgtcacctacgtgccagcccaggagaagaacttcaccactgcccctgctatctgccacgacggcaaggctcacttccccagggaaggtgtcttcgtgagcaacggcacccactggttcgtcactcagagaaacttctacgagccacagatcatcaccactgacaacactttcgtgtctggaaactgcgacgtggtcatcggtatcgtcaacaacaccgtgtacgaccccctgcagccagagctggactcattcaaggaggaactggacaagtacttcaagaaccacacctcccctgacgtcgacctgggcgacatctcaggaatcaacgcttccgtcgtgaacatccagaaggagatcgaccgcctgaacgaagtggccaagaacctgaacgaaagcctgatcgacctgcaggagctgggcaagtacgaacagtacatcaagtggccttggtacatctggctgggtttcatcgctggcctcatcgctatcgtgatggtgaccatcatgctgtgctgcatgacttcatgctgctcctgcctgaagggctgctgcagctgcggatcttgctgcaagttcgacgaggacgactctgaacccgtcctgaagggcgtgaagctgcactacacc

SEQ ID NO: 209 - protein, 1270 aa, synthetic construct
MFVFLVLLPLVSSQCVNLITRTQSYTNSFTRGVYYPDKVFRSSVLHSTQDLFLPFFSNVTWFHAIHVSGTNGTKRFDNPVLPFNDGVYFASTEKSNIIRGWIFGTTLDSKTQSLLIVNNATNVVIKVCEFQFCNDPFLDVYYHENNKSRMESELRVYSSANNCTFEYVSQPFLMDLEGKQGNFKNLREFVFKNIDGYFKIYSKHTPVNLGRDLPQGFSALEPLVDLPIGINITRFQTLLALHRSYLTPGDSSSSWTAGAAAYYVGYLQPRTFLLKYNENGTITDAVDCALDPLSETKCTLKSFTVEKGIYQTSNFRVQPTESIVRFPNITNLCPFHEVFNATTFASVYAWNRKRISNCVADYSVLYNFAPFFAFKCYGVSPTKLNDLCFTNVYADSFVIRGNEVSQIAPGQTGNIADYNYKLPDDFTGCVIAWNSNKLDSKVSGNYNYRYRLFRKSKLKPFERDISTEIYQAGNKPCNGVAGSNCYFPLQSYGFRPTYGVGHQPYRVVVLSFELLHAPATVCGPKKSTNLVKNKCVNFNFNGLTGTGVLTESNKKFLPFQQFGRDIADTTDAVRDPQTLEILDITPCSFGGVSVITPGTNISNQVAVLYQGVNCTEVPVAIHADQLTPTWRVYSTGSNVFQTRAGCLIGAEYVNNSYECDIPIGAGICASYQTQTKSHQQAQSVASQSIIAYTMSLGAENSVAYSNNSIAIPTNFTISVTTEILPVSMTKTSVDCTMYICGDSTECSNLLLQYGSFCTQLKRALTGIAVEQDKNTQEVFAQVKQIYKTPPIKYFGGFNFSQILPDPSKPSKRSFIEDLLFNKVTLADAGFIKQYGDCLGDIAARDLICAQKFNGLTVLPPLLTDEMIAQYTSALLAGTITSGWTFGAGAALQIPFAMQMAYRFNGIGVTQNVLYENQKLIANQFNSAIGKIQDSLSSTASALGKLQDVVNHNAQALNTLVKQLSSKFGAISSVLNDILSRLDPPEAEVQIDRLITGRLQSLQTYVTQQLIRAAEIRASANLAATKMSECVLGQSKRVDFCGKGYHLMSFPQSAPHGVVFLHVTYVPAQEKNFTTAPAICHDGKAHFPREGVFVSNGTHWFVTQRNFYEPQIITTDNTFVSGNCDVVIGIVNNTVYDPLQPELDSFKEELDKYFKNHTSPDVDLGDISGINASVVNIQKEIDRLNEVAKNLNESLINLQELGKYEQYIKWPWYIWLGFIAGLIAIVMVTIMLCCMTSCCSCLKGCCSCGSCCKFDEDDSEPVLKGVKLHYT

SEQ ID NO: 210 - DNA, 3813 bp, synthetic construct
  source 1..3813: mol_type = other DNA
atgttcgtcttcctggtgctgctgcctctggtctccagccagtgcgtgaacctgatcaccaggactcagtcctacaccaacagcttcactagaggtgtgtactaccctgacaaggtcttccgctcttcagtgctgcactctactcaggacctgttcctgcccttcttctcaaacgtcacctggttccacgccatccacgtgtccggcaccaacggcactaagagattcgacaacccagtgctgcctttcaacgacggcgtctacttcgcttctaccgagaagtcaaacatcatccgcggatggatcttcggcaccactctggactccaagactcagagcctgctgatcgtcaacaacgccaccaacgtggtcatcaaggtgtgcgaattccagttctgcaacgacccattcctggacgtgtactaccacgagaacaacaagtctcgcatggagtcagaattgagagtctactccagcgctaacaactgcactttcgagtacgtgtctcagcctttcctgatggacctggaaggaaagcagggtaacttcaagaacctgcgtgagttcgtcttcaagaacatcgacggttacttcaagatttactctaagcacaccccagtgaacctgggtagggacctgcctcagggcttctcagctctggagccactggtggacctgcctatcggcatcaacatcaccaggttccagactctgctggctctgcacagaagctacctgactccaggagactcatcttctagctggactgctggagctgctgcttactacgtgggttacctgcagcctcgcaccttcctgctgaagtacaacgaaaacggcaccatcactgacgccgtcgactgcgctctggaccctctgtctgaaaccaagtgcactctgaagtcattcaccgtggagaagggcatctaccagacttccaacttccgcgtgcagcccaccgaaagcatcgtccgtttccctaacatcactaacctgtgccccttccacgaggtcttcaacgccaccaccttcgcttctgtgtacgcctggaaccgcaagcgtatctctaactgcgtcgccgactactcagtgctgtacaacttcgctcccttcttcgccttcaagtgctacggagtgtcaccaactaagctgaacgacctgtgcttcaccaacgtctacgctgactctttcgtgatcaggggtaacgaggtctcacagatcgctccaggccagactggaaacatcgccgactacaactacaagctgcctgacgacttcaccggttgcgtcatcgcttggaactccaacaagctggacagcaaagtgagcggcaactacaactaccgttacaggctgttcagaaagtccaaactgaagcccttcgagcgtgacatcagcactgaaatctaccaggctggtaacaagccatgcaacggtgtcgccggctccaactgctacttccccctgcagtcctacggcttccgtccaacctacggtgtgggccaccagccttacagggtggtcgtgctgtccttcgaactcctccacgctccagctactgtgtgcggaccaaagaagagcaccaacctggtcaagaacaagtgcgtgaacttcaacttcaacggtctgaccggaactggtgtcctgaccgagtctaacaagaagttcctgcccttccagcagttcggtcgtgacatcgctgacactaccgacgccgtgagggacccccagaccctggaaatcctggacatcactccatgctctttcggaggtgtctcagtgatcactccaggaaccaacatctcaaaccaggtcgctgtgctgtaccagggtgtcaactgcaccgaagtccctgtggccatccacgctgaccagctgacccccacttggagagtgtacagcaccggctctaacgtcttccagactcgcgctggttgcctgatcggcgccgagtacgtgaacaactcttacgaatgcgacatccccatcggcgctggaatctgcgcctcataccagacccagactaagtcccaccagcaggctcagagcgtcgcctcacagtccatcatcgcttacaccatgtctctgggcgctgaaaactcagtggcctactcaaacaactccatcgccatccctaccaacttcactatctccgtgaccactgagatcctgcccgtctccatgaccaagactagcgtggactgcactatgtacatctgcggagactccaccgaatgcagcaacctgctgctgcagtacggtagcttctgcacccagctgaagcgtgctctgactggcatcgccgtggagcaggacaagaacactcaggaagtcttcgctcaggtgaagcaaatctacaagacccctcccatcaagtacttcggcggattcaacttctcccagatcctgcctgaccccagcaagccatctaagagatcattcatcgaggacctgctgttcaacaaggtcactctggccgacgctggtttcatcaagcagtacggagactgcctgggtgacatcgccgctcgcgacctgatctgcgctcagaagttcaacggcctgaccgtgctgccacctctgctgactgacgaaatgatcgcccagtacacttccgccctgctggctggaaccatcacttctggttggaccttcggtgctggtgctgctctgcagatccctttcgctatgcagatggcctacaggttcaacggaatcggtgtcacccagaacgtgctgtacgagaaccagaagctgatcgctaaccagttcaactccgccatcggcaagatccaggactccctgagctctactgccagcgctctgggaaagctgcaggacgtcgtgaaccacaacgcccaggctctgaacaccctggtcaagcagctgtcatccaagttcggagctatcagctctgtgctgaacgacatcctctcccgcctggaccctcctgaggctgaagtccagatcgacaggctgatcactggtagactgcagtctctgcagacctacgtgactcagcagctgatccgcgccgctgaaatccgtgcctcagctaacctggccgctaccaagatgtctgagtgcgtcctgggccagagcaagagggtggacttctgcggcaagggataccacctgatgtctttccctcagtcagctccccacggagtcgtgttcctgcacgtcacctacgtgccagcccaggagaagaacttcaccactgcccctgctatctgccacgacggcaaggctcacttcccccgtgaaggagtcttcgtgtccaacggcacccactggttcgtcactcagaggaacttctacgagccacagatcatcaccactgacaacactttcgtgagcggcaactgcgacgtggtcatcggtatcgtcaacaacaccgtgtacgaccccctgcagccagagctggactccttcaaggaagagctggacaagtacttcaagaaccacaccagcccagacgtcgacctgggcgacatctctggaatcaacgcttcagtcgtgaacatccagaaggagatcgaccgtctgaacgaagtggccaagaacctgaacgaatctctgatcaacctgcaggagctgggaaagtacgaacagtacatcaagtggccttggtacatctggctgggtttcatcgctggcctcatcgctatcgtgatggtgaccatcatgctgtgctgcatgacttcctgctgcagctgcctgaagggctgctgctcttgcggatcatgctgcaagttcgacgaggacgactcagaacccgtcctgaagggcgtgaagctgcactacacctaa

SEQ ID NO: 211 - protein, 1268 aa, synthetic construct
MFVFLVLLPLVSSQCVNLITRTQSYTNSFTRGVYYPDKVFRSSVLHSTQDLFLPFFSNVTWFHAISGTNGTKRFDNPVLPFNDGVYFASTEKSNIIRGWIFGTTLDSKTQSLLIVNNATNVVIKVCEFQFCNDPFLDVYYHKNNKSWMESEFRVYSSANNCTFEYVSQPFLMDLEGKQGNFKNLREFVFKNIDGYFKIYSKHTPINLGRDLPQGFSALEPLVDLPIGINITRFQTLLALHRSYLTPGDSSSGWTAGAAAYYVGYLQPRTFLLKYNENGTITDAVDCALDPLSETKCTLKSFTVEKGIYQTSNFRVQPTESIVRFPNITNLCPFDEVFNATTFASVYAWNRKRISNCVADYSVLYNFAPFFAFKCYGVSPTKLNDLCFTNVYADSFVIRGNEVSQIAPGQTGNIADYNYKLPDDFTGCVIAWNSNKLDSKVGGNYNYRYRLFRKSNLKPFERDISTEIYQAGNKPCNGVAGVNCYFPLQSYGFRPTYGVGHQPYRVVVLSFELLHAPATVCGPKKSTNLVKNKCVNFNFNGLTGTGVLTESNKKFLPFQQFGRDIADTTDAVRDPQTLEILDITPCSFGGVSVITPGTNTSNQVAVLYQGVNCTEVPVAIHADQLTPTWRVYSTGSNVFQTRAGCLIGAEYVNNSYECDIPIGAGICASYQTQTKSHQQAQSVASQSIIAYTMSLGAENSVAYSNNSIAIPTNFTISVTTEILPVSMTKTSVDCTMYICGDSTECSNLLLQYGSFCTQLKRALTGIAVEQDKNTQEVFAQVKQIYKTPPIKYFGGFNFSQILPDPSKPSKRSFIEDLLFNKVTLADAGFIKQYGDCLGDIAARDLICAQKFNGLTVLPPLLTDEMIAQYTSALLAGTITSGWTFGAGAALQIPFAMQMAYRFNGIGVTQNVLYENQKLIANQFNSAIGKIQDSLSSTASALGKLQDVVNHNAQALNTLVKQLSSKFGAISSVLNDILSRLDPPEAEVQIDRLITGRLQSLQTYVTQQLIRAAEIRASANLAATKMSECVLGQSKRVDFCGKGYHLMSFPQSAPHGVVFLHVTYVPAQEKNFTTAPAICHDGKAHFPREGVFVSNGTHWFVTQRNFYEPQIITTDNTFVSGNCDVVIGIVNNTVYDPLQPELDSFKEELDKYFKNHTSPDVDLGDISGINASVVNIQKEIDRLNEVAKNLNESLIDLQELGKYEQYIKWPWYIWLGFIAGLIAIVMVTIMLCCMTSCCSCLKGCCSCGSCCKFDEDDSEPVLKGVKLHYT

SEQ ID NO: 212 - DNA, 3807 bp, synthetic construct
  source 1..3807: mol_type = other DNA
atgttcgtcttcctggtgctgctgcctctggtctccagccagtgcgtgaacctgatcaccaggactcagtcctacaccaacagcttcactagaggtgtgtactaccctgacaaggtcttccgctcttcagtgctgcactctactcaggacctgttcctgcccttcttctcaaacgtcacctggttccacgccatctccggcaccaacggcactaagagattcgacaacccagtgctgcctttcaacgacggcgtctacttcgcttctaccgagaagtcaaacatcatccgcggatggatcttcggcaccactctggactccaagactcagagcctgctgatcgtcaacaacgccaccaacgtggtcatcaaggtgtgcgaattccagttctgcaacgacccattcctggacgtgtactaccacaagaacaacaagtcttggatggagtcagaattcagagtctactccagcgctaacaactgcactttcgagtacgtgtctcagcctttcctgatggacctggaaggaaagcagggtaacttcaagaacctgcgtgagttcgtcttcaagaacatcgacggttacttcaagatttactctaagcacaccccaatcaacctgggtagggacctgcctcagggcttctcagctctggagccactggtggacctgcctatcggcatcaacatcaccaggttccagactctgctggctctgcacagaagctacctgactccaggagactcatcttctggatggactgctggagctgctgcttactacgtgggttacctgcagcctcgcaccttcctgctgaagtacaacgaaaacggcaccatcactgacgccgtcgactgcgctctggaccctctgtctgaaaccaagtgcactctgaagtcattcaccgtggagaagggcatctaccagacttccaacttccgcgtgcagcccaccgaaagcatcgtccgtttccctaacatcactaacctgtgccccttcgacgaggtcttcaacgccaccaccttcgcttctgtgtacgcctggaaccgcaagcgtatctctaactgcgtcgccgactactcagtgctgtacaacttcgctcccttcttcgccttcaagtgctacggagtgtcaccaactaagctgaacgacctgtgcttcaccaacgtctacgctgactctttcgtgatcaggggtaacgaggtctcacagatcgctccaggccagactggaaacatcgccgactacaactacaagctgcctgacgacttcaccggttgcgtcatcgcttggaactccaacaagctggacagcaaagtgggtggcaactacaactaccgttacaggctgttcagaaagtccaacctgaagcccttcgagcgtgacatcagcactgaaatctaccaggctggtaacaagccatgcaacggtgtcgccggcgtcaactgctacttccccctgcagtcctacggcttccgtccaacctacggtgtgggccaccagccttacagggtggtcgtgctgtccttcgaactcctccacgctccagctactgtgtgcggaccaaagaagagcaccaacctggtcaagaacaagtgcgtgaacttcaacttcaacggtctgaccggaactggtgtcctgaccgagtctaacaagaagttcctgcccttccagcagttcggtcgtgacatcgctgacactaccgacgccgtgagggacccccagaccctggaaatcctggacatcactccatgctctttcggaggtgtctcagtgatcactccaggaaccaacacttcaaaccaggtcgctgtgctgtaccagggtgtcaactgcaccgaagtccctgtggccatccacgctgaccagctgacccccacttggagagtgtacagcaccggctctaacgtcttccagactcgcgctggttgcctgatcggcgccgagtacgtgaacaactcttacgaatgcgacatccccatcggcgctggaatctgcgcctcataccagacccagactaagtcccaccagcaggctcagagcgtcgcctcacagtccatcatcgcttacaccatgtctctgggcgctgaaaactcagtggcctactcaaacaactccatcgccatccctaccaacttcactatctccgtgaccactgagatcctgcccgtctccatgaccaagactagcgtggactgcactatgtacatctgcggagactccaccgaatgcagcaacctgctgctgcagtacggtagcttctgcacccagctgaagcgtgctctgactggcatcgccgtggagcaggacaagaacactcaggaagtcttcgctcaggtgaagcaaatctacaagacccctcccatcaagtacttcggcggattcaacttctcccagatcctgcctgaccccagcaagccatctaagagatcattcatcgaggacctgctgttcaacaaggtcactctggccgacgctggtttcatcaagcagtacggagactgcctgggtgacatcgccgctcgcgacctgatctgcgctcagaagttcaacggcctgaccgtgctgccacctctgctgactgacgaaatgatcgcccagtacacttccgccctgctggctggaaccatcacttctggttggaccttcggtgctggtgctgctctgcagatccctttcgctatgcagatggcctacaggttcaacggaatcggtgtcacccagaacgtgctgtacgagaaccagaagctgatcgctaaccagttcaactccgccatcggcaagatccaggactccctgagctctactgccagcgctctgggaaagctgcaggacgtcgtgaaccacaacgcccaggctctgaacaccctggtcaagcagctgtcatccaagttcggagctatcagctctgtgctgaacgacatcctctcccgcctggaccctcctgaggctgaagtccagatcgacaggctgatcactggtagactgcagtctctgcagacctacgtgactcagcagctgatccgcgccgctgaaatccgtgcctcagctaacctggccgctaccaagatgtctgagtgcgtcctgggccagagcaagagggtggacttctgcggcaagggataccacctgatgtctttccctcagtcagctccccacggagtcgtgttcctgcacgtcacctacgtgccagcccaggagaagaacttcaccactgcccctgctatctgccacgacggcaaggctcacttcccccgtgaaggagtcttcgtgtccaacggcacccactggttcgtcactcagaggaacttctacgagccacagatcatcaccactgacaacactttcgtgagcggcaactgcgacgtggtcatcggtatcgtcaacaacaccgtgtacgaccccctgcagccagagctggactccttcaaggaagagctggacaagtacttcaagaaccacaccagcccagacgtcgacctgggcgacatctctggaatcaacgcttcagtcgtgaacatccagaaggagatcgaccgtctgaacgaagtggccaagaacctgaacgaatctctgatcgacctgcaggagctgggaaagtacgaacagtacatcaagtggccttggtacatctggctgggtttcatcgctggcctcatcgctatcgtgatggtgaccatcatgctgtgctgcatgacttcctgctgcagctgcctgaagggctgctgctcttgcggatcatgctgcaagttcgacgaggacgactcagaacccgtcctgaagggcgtgaagctgcactacacctaa

SEQ ID NO: 213 - protein, 1268 aa, synthetic construct
MFVFLVLLPLVSSQCVNLITRTQSYTNSFTRGVYYPDKVFRSSVLHSTQDLFLPFFSNVTWFHAISGTNGTKRFDNPVLPFNDGVYFASTEKSNIIRGWIFGTTLDSKTQSLLIVNNATNVVIKVCEFQFCNDPFLDVYYHKNNKSWMESEFRVYSSANNCTFEYVSQPFLMDLEGKQGNFKNLREFVFKNIDGYFKIYSKHTPINLGRDLPQGFSALEPLVDLPIGINITRFQTLLALHRSYLTPGDSSSGWTAGAAAYYVGYLQPRTFLLKYNENGTITDAVDCALDPLSETKCTLKSFTVEKGIYQTSNFRVQPTESIVRFPNITNLCPFDEVFNATTFASVYAWNRKRISNCVADYSVLYNFAPFFAFKCYGVSPTKLNDLCFTNVYADSFVIRGNEVSQIAPGQTGNIADYNYKLPDDFTGCVIAWNSNKLDSTVGGNYNYRYRLFRKSKLKPFERDISTEIYQAGNKPCNGVAGVNCYFPLQSYGFRPTYGVGHQPYRVVVLSFELLHAPATVCGPKKSTNLVKNKCVNFNFNGLTGTGVLTESNKKFLPFQQFGRDIADTTDAVRDPQTLEILDITPCSFGGVSVITPGTNTSNQVAVLYQGVNCTEVPVAIHADQLTPTWRVYSTGSNVFQTRAGCLIGAEYVNNSYECDIPIGAGICASYQTQTKSHQQAQSVASQSIIAYTMSLGAENSVAYSNNSIAIPTNFTISVTTEILPVSMTKTSVDCTMYICGDSTECSNLLLQYGSFCTQLKRALTGIAVEQDKNTQEVFAQVKQIYKTPPIKYFGGFNFSQILPDPSKPSKRSFIEDLLFNKVTLADAGFIKQYGDCLGDIAARDLICAQKFNGLTVLPPLLTDEMIAQYTSALLAGTITSGWTFGAGAALQIPFAMQMAYRFNGIGVTQNVLYENQKLIANQFNSAIGKIQDSLSSTASALGKLQDVVNHNAQALNTLVKQLSSKFGAISSVLNDILSRLDPPEAEVQIDRLITGRLQSLQTYVTQQLIRAAEIRASANLAATKMSECVLGQSKRVDFCGKGYHLMSFPQSAPHGVVFLHVTYVPAQEKNFTTAPAICHDGKAHFPREGVFVSNGTHWFVTQRNFYEPQIITTDNTFVSGNCDVVIGIVNNTVYDPLQPELDSFKEELDKYFKNHTSPDVDLGDISGINASVVNIQKEIDRLNEVAKNLNESLIDLQELGKYEQYIKWPWYIWLGFIAGLIAIVMVTIMLCCMTSCCSCLKGCCSCGSCCKFDEDDSEPVLKGVKLHYT

SEQ ID NO: 214 - DNA, 3807 bp, synthetic construct
  source 1..3807: mol_type = other DNA
atgttcgtcttcctggtgctgctgcctctggtctccagccagtgcgtgaacctgatcaccaggactcagtcctacaccaacagcttcactagaggtgtgtactaccctgacaaggtcttccgctcttcagtgctgcactctactcaggacctgttcctgcccttcttctcaaacgtcacctggttccacgccatctccggcaccaacggcactaagagattcgacaacccagtgctgcctttcaacgacggcgtctacttcgcttctaccgagaagtcaaacatcatccgcggatggatcttcggcaccactctggactccaagactcagagcctgctgatcgtcaacaacgccaccaacgtggtcatcaaggtgtgcgaattccagttctgcaacgacccattcctggacgtgtactaccacaagaacaacaagtcttggatggagtcagaattcagagtctactccagcgctaacaactgcactttcgagtacgtgtctcagcctttcctgatggacctggaaggaaagcagggtaacttcaagaacctgcgtgagttcgtcttcaagaacatcgacggttacttcaagatttactctaagcacaccccaatcaacctgggtagggacctgcctcagggcttctcagctctggagccactggtggacctgcctatcggcatcaacatcaccaggttccagactctgctggctctgcacagaagctacctgactccaggagactcatcttctggatggactgctggagctgctgcttactacgtgggttacctgcagcctcgcaccttcctgctgaagtacaacgaaaacggcaccatcactgacgccgtcgactgcgctctggaccctctgtctgaaaccaagtgcactctgaagtcattcaccgtggagaagggcatctaccagacttccaacttccgcgtgcagcccaccgaaagcatcgtccgtttccctaacatcactaacctgtgccccttcgacgaggtcttcaacgccaccaccttcgcttctgtgtacgcctggaaccgcaagcgtatctctaactgcgtcgccgactactcagtgctgtacaacttcgctcccttcttcgccttcaagtgctacggagtgtcaccaactaagctgaacgacctgtgcttcaccaacgtctacgctgactctttcgtgatcaggggtaacgaggtctcacagatcgctccaggccagactggaaacatcgccgactacaactacaagctgcctgacgacttcaccggttgcgtcatcgcttggaactccaacaagctggacagcaccgtgggtggcaactacaactaccgttacaggctgttcagaaagtccaagctgaagcccttcgagcgtgacatcagcactgaaatctaccaggctggtaacaagccatgcaacggtgtcgccggcgtcaactgctacttccccctgcagtcctacggcttccgtccaacctacggtgtgggccaccagccttacagggtggtcgtgctgtccttcgaactcctccacgctccagctactgtgtgcggaccaaagaagagcaccaacctggtcaagaacaagtgcgtgaacttcaacttcaacggtctgaccggaactggtgtcctgaccgagtctaacaagaagttcctgcccttccagcagttcggtcgtgacatcgctgacactaccgacgccgtgagggacccccagaccctggaaatcctggacatcactccatgctctttcggaggtgtctcagtgatcactccaggaaccaacacttcaaaccaggtcgctgtgctgtaccagggtgtcaactgcaccgaagtccctgtggccatccacgctgaccagctgacccccacttggagagtgtacagcaccggctctaacgtcttccagactcgcgctggttgcctgatcggcgccgagtacgtgaacaactcttacgaatgcgacatccccatcggcgctggaatctgcgcctcataccagacccagactaagtcccaccagcaggctcagagcgtcgcctcacagtccatcatcgcttacaccatgtctctgggcgctgaaaactcagtggcctactcaaacaactccatcgccatccctaccaacttcactatctccgtgaccactgagatcctgcccgtctccatgaccaagactagcgtggactgcactatgtacatctgcggagactccaccgaatgcagcaacctgctgctgcagtacggtagcttctgcacccagctgaagcgtgctctgactggcatcgccgtggagcaggacaagaacactcaggaagtcttcgctcaggtgaagcaaatctacaagacccctcccatcaagtacttcggcggattcaacttctcccagatcctgcctgaccccagcaagccatctaagagatcattcatcgaggacctgctgttcaacaaggtcactctggccgacgctggtttcatcaagcagtacggagactgcctgggtgacatcgccgctcgcgacctgatctgcgctcagaagttcaacggcctgaccgtgctgccacctctgctgactgacgaaatgatcgcccagtacacttccgccctgctggctggaaccatcacttctggttggaccttcggtgctggtgctgctctgcagatccctttcgctatgcagatggcctacaggttcaacggaatcggtgtcacccagaacgtgctgtacgagaaccagaagctgatcgctaaccagttcaactccgccatcggcaagatccaggactccctgagctctactgccagcgctctgggaaagctgcaggacgtcgtgaaccacaacgcccaggctctgaacaccctggtcaagcagctgtcatccaagttcggagctatcagctctgtgctgaacgacatcctctcccgcctggaccctcctgaggctgaagtccagatcgacaggctgatcactggtagactgcagtctctgcagacctacgtgactcagcagctgatccgcgccgctgaaatccgtgcctcagctaacctggccgctaccaagatgtctgagtgcgtcctgggccagagcaagagggtggacttctgcggcaagggataccacctgatgtctttccctcagtcagctccccacggagtcgtgttcctgcacgtcacctacgtgccagcccaggagaagaacttcaccactgcccctgctatctgccacgacggcaaggctcacttcccccgtgaaggagtcttcgtgtccaacggcacccactggttcgtcactcagaggaacttctacgagccacagatcatcaccactgacaacactttcgtgagcggcaactgcgacgtggtcatcggtatcgtcaacaacaccgtgtacgaccccctgcagccagagctggactccttcaaggaagagctggacaagtacttcaagaaccacaccagcccagacgtcgacctgggcgacatctctggaatcaacgcttcagtcgtgaacatccagaaggagatcgaccgtctgaacgaagtggccaagaacctgaacgaatctctgatcgacctgcaggagctgggaaagtacgaacagtacatcaagtggccttggtacatctggctgggtttcatcgctggcctcatcgctatcgtgatggtgaccatcatgctgtgctgcatgacttcctgctgcagctgcctgaagggctgctgctcttgcggatcatgctgcaagttcgacgaggacgactcagaacccgtcctgaagggcgtgaagctgcactacacctaa

SEQ ID NO: 215 - protein, 1268 aa, synthetic construct
MFVFLVLLPLVSSQCVNLITRTQSYTNSFTRGVYYPDKVFRSSVLHSTQDLFLPFFSNVTWFHAISGTNGTKRFDNPVLPFNDGVYFASTEKSNIIRGWIFGTTLDSKTQSLLIVNNATNVVIKVCEFQFCNDPFLDVYYHKNNKSWMESEFRVYSSANNCTFEYVSQPFLMDLEGKQGNFKNLREFVFKNIDGYFKIYSKHTPINLGRDLPQGFSALEPLVDLPIGINITRFQTLLALHRSYLTPGDSSSGWTAGAAAYYVGYLQPRTFLLKYNENGTITDAVDCALDPLSETKCTLKSFTVEKGIYQTSNFRVQPTESIVRFPNITNLCPFDEVFNATRFASVYAWNRKRISNCVADYSVLYNFAPFFAFKCYGVSPTKLNDLCFTNVYADSFVIRGNEVSQIAPGQTGNIADYNYKLPDDFTGCVIAWNSNKLDSTVGGNYNYRYRLFRKSKLKPFERDISTEIYQAGNKPCNGVAGVNCYFPLQSYGFRPTYGVGHQPYRVVVLSFELLHAPATVCGPKKSTNLVKNKCVNFNFNGLTGTGVLTESNKKFLPFQQFGRDIADTTDAVRDPQTLEILDITPCSFGGVSVITPGTNTSNQVAVLYQGVNCTEVPVAIHADQLTPTWRVYSTGSNVFQTRAGCLIGAEYVNNSYECDIPIGAGICASYQTQTKSHQQAQSVASQSIIAYTMSLGAENSVAYSNNSIAIPTNFTISVTTEILPVSMTKTSVDCTMYICGDSTECSNLLLQYGSFCTQLKRALTGIAVEQDKNTQEVFAQVKQIYKTPPIKYFGGFNFSQILPDPSKPSKRSFIEDLLFNKVTLADAGFIKQYGDCLGDIAARDLICAQKFNGLTVLPPLLTDEMIAQYTSALLAGTITSGWTFGAGAALQIPFAMQMAYRFNGIGVTQNVLYENQKLIANQFNSAIGKIQDSLSSTASALGKLQDVVNHNAQALNTLVKQLSSKFGAISSVLNDILSRLDPPEAEVQIDRLITGRLQSLQTYVTQQLIRAAEIRASANLAATKMSECVLGQSKRVDFCGKGYHLMSFPQSAPHGVVFLHVTYVPAQEKNFTTAPAICHDGKAHFPREGVFVSNGTHWFVTQRNFYEPQIITTDNTFVSGNCDVVIGIVNNTVYDPLQPELDSFKEELDKYFKNHTSPDVDLGDISGINASVVNIQKEIDRLNEVAKNLNESLIDLQELGKYEQYIKWPWYIWLGFIAGLIAIVMVTIMLCCMTSCCSCLKGCCSCGSCCKFDEDDSEPVLKGVKLHYT

SEQ ID NO: 216 - DNA, 3807 bp, synthetic construct
  source 1..3807: mol_type = other DNA
atgttcgtcttcctggtgctgctgcctctggtctccagccagtgcgtgaacctgatcaccaggactcagtcctacaccaacagcttcactagaggtgtgtactaccctgacaaggtcttccgctcttcagtgctgcactctactcaggacctgttcctgcccttcttctcaaacgtcacctggttccacgccatctccggcaccaacggcactaagagattcgacaacccagtgctgcctttcaacgacggcgtctacttcgcttctaccgagaagtcaaacatcatccgcggatggatcttcggcaccactctggactccaagactcagagcctgctgatcgtcaacaacgccaccaacgtggtcatcaaggtgtgcgaattccagttctgcaacgacccattcctggacgtgtactaccacaagaacaacaagtcttggatggagtcagaattcagagtctactccagcgctaacaactgcactttcgagtacgtgtctcagcctttcctgatggacctggaaggaaagcagggtaacttcaagaacctgcgtgagttcgtcttcaagaacatcgacggttacttcaagatttactctaagcacaccccaatcaacctgggtagggacctgcctcagggcttctcagctctggagccactggtggacctgcctatcggcatcaacatcaccaggttccagactctgctggctctgcacagaagctacctgactccaggagactcatcttctggatggactgctggagctgctgcttactacgtgggttacctgcagcctcgcaccttcctgctgaagtacaacgaaaacggcaccatcactgacgccgtcgactgcgctctggaccctctgtctgaaaccaagtgcactctgaagtcattcaccgtggagaagggcatctaccagacttccaacttccgcgtgcagcccaccgaaagcatcgtccgtttccctaacatcactaacctgtgccccttcgacgaggtcttcaacgccacccgtttcgcttctgtgtacgcctggaaccgcaagcgtatctctaactgcgtcgccgactactcagtgctgtacaacttcgctcccttcttcgccttcaagtgctacggagtgtcaccaactaagctgaacgacctgtgcttcaccaacgtctacgctgactctttcgtgatcaggggtaacgaggtctcacagatcgctccaggccagactggaaacatcgccgactacaactacaagctgcctgacgacttcaccggttgcgtcatcgcttggaactccaacaagctggacagcaccgtgggtggcaactacaactaccgttacaggctgttcagaaagtccaagctgaagcccttcgagcgtgacatcagcactgaaatctaccaggctggtaacaagccatgcaacggtgtcgccggcgtcaactgctacttccccctgcagtcctacggcttccgtccaacctacggtgtgggccaccagccttacagggtggtcgtgctgtccttcgaactcctccacgctccagctactgtgtgcggaccaaagaagagcaccaacctggtcaagaacaagtgcgtgaacttcaacttcaacggtctgaccggaactggtgtcctgaccgagtctaacaagaagttcctgcccttccagcagttcggtcgtgacatcgctgacactaccgacgccgtgagggacccccagaccctggaaatcctggacatcactccatgctctttcggaggtgtctcagtgatcactccaggaaccaacacttcaaaccaggtcgctgtgctgtaccagggtgtcaactgcaccgaagtccctgtggccatccacgctgaccagctgacccccacttggagagtgtacagcaccggctctaacgtcttccagactcgcgctggttgcctgatcggcgccgagtacgtgaacaactcttacgaatgcgacatccccatcggcgctggaatctgcgcctcataccagacccagactaagtcccaccagcaggctcagagcgtcgcctcacagtccatcatcgcttacaccatgtctctgggcgctgaaaactcagtggcctactcaaacaactccatcgccatccctaccaacttcactatctccgtgaccactgagatcctgcccgtctccatgaccaagactagcgtggactgcactatgtacatctgcggagactccaccgaatgcagcaacctgctgctgcagtacggtagcttctgcacccagctgaagcgtgctctgactggcatcgccgtggagcaggacaagaacactcaggaagtcttcgctcaggtgaagcaaatctacaagacccctcccatcaagtacttcggcggattcaacttctcccagatcctgcctgaccccagcaagccatctaagagatcattcatcgaggacctgctgttcaacaaggtcactctggccgacgctggtttcatcaagcagtacggagactgcctgggtgacatcgccgctcgcgacctgatctgcgctcagaagttcaacggcctgaccgtgctgccacctctgctgactgacgaaatgatcgcccagtacacttccgccctgctggctggaaccatcacttctggttggaccttcggtgctggtgctgctctgcagatccctttcgctatgcagatggcctacaggttcaacggaatcggtgtcacccagaacgtgctgtacgagaaccagaagctgatcgctaaccagttcaactccgccatcggcaagatccaggactccctgagctctactgccagcgctctgggaaagctgcaggacgtcgtgaaccacaacgcccaggctctgaacaccctggtcaagcagctgtcatccaagttcggagctatcagctctgtgctgaacgacatcctctcccgcctggaccctcctgaggctgaagtccagatcgacaggctgatcactggtagactgcagtctctgcagacctacgtgactcagcagctgatccgcgccgctgaaatccgtgcctcagctaacctggccgctaccaagatgtctgagtgcgtcctgggccagagcaagagggtggacttctgcggcaagggataccacctgatgtctttccctcagtcagctccccacggagtcgtgttcctgcacgtcacctacgtgccagcccaggagaagaacttcaccactgcccctgctatctgccacgacggcaaggctcacttcccccgtgaaggagtcttcgtgtccaacggcacccactggttcgtcactcagaggaacttctacgagccacagatcatcaccactgacaacactttcgtgagcggcaactgcgacgtggtcatcggtatcgtcaacaacaccgtgtacgaccccctgcagccagagctggactccttcaaggaagagctggacaagtacttcaagaaccacaccagcccagacgtcgacctgggcgacatctctggaatcaacgcttcagtcgtgaacatccagaaggagatcgaccgtctgaacgaagtggccaagaacctgaacgaatctctgatcgacctgcaggagctgggaaagtacgaacagtacatcaagtggccttggtacatctggctgggtttcatcgctggcctcatcgctatcgtgatggtgaccatcatgctgtgctgcatgacttcctgctgcagctgcctgaagggctgctgctcttgcggatcatgctgcaagttcgacgaggacgactcagaacccgtcctgaagggcgtgaagctgcactacacctaa

SEQ ID NO: 217 - protein, 1257 aa, synthetic construct; identical to SEQ ID NO: 175

SEQ ID NO: 218 - protein, 1257 aa, synthetic construct; identical to SEQ ID NO: 195

SEQ ID NO: 219 - protein, 1257 aa, synthetic construct
QCVNLITRTQSYTNSFTRGVYYPDKVFRSSVLHSTQDLFLPFFSNVTWFHAIHVSGTNGTKRFDNPVLPFNDGVYFASTEKSNIIRGWIFGTTLDSKTQSLLIVNNATNVVIKVCEFQFCNDPFLDVYYHKNNKSWMESEFRVYSSANNCTFEYVSQPFLMDLEGKQGNFKNLREFVFKNIDGYFKIYSKHTPINLGRDLPQGFSALEPLVDLPIGINITRFQTLLALHRSYLTPGDSSSGWTAGAAAYYVGYLQPRTFLLKYNENGTITDAVDCALDPLSETKCTLKSFTVEKGIYQTSNFRVQPTESIVRFPNITNLCPFDEVFNATRFASVYAWNRKRISNCVADYSVLYNFAPFFAFKCYGVSPTKLNDLCFTNVYADSFVIRGNEVSQIAPGQTGNIADYNYKLPDDFTGCVIAWNSNKLDSKVGGNYNYQYRLFRKSNLKPFERDISTEIYQAGNKPCNGVAGFNCYFPLRSYGFRPTYGVGHQPYRVVVLSFELLHAPATVCGPKKSTNLVKNKCVNFNFNGLTGTGVLTESNKKFLPFQQFGRDIADTTDAVRDPQTLEILDITPCSFGGVSVITPGTNTSNQVAVLYQGVNCTEVPVAIHADQLTPTWRVYSTGSNVFQTRAGCLIGAEYVNNSYECDIPIGAGICASYQTQTKSHQQAQSVASQSIIAYTMSLGAENLVAYSNNSIAIPTNFTISVTTEILPVSMTKTSVDCTMYICGDSTECSNLLLQYGSFCTQLKRALTGIAVEQDKNTQEVFAQVKQIYKTPPIKYFGGFNFSQILPDPSKPSKRSFIEDLLFNKVTLADAGFIKQYGDCLGDIAARDLICAQKFNGLTVLPPLLTDEMIAQYTSALLAGTITSGWTFGAGAALQIPFAMQMAYRFNGIGVTQNVLYENQKLIANQFNSAIGKIQDSLSSTASALGKLQDVVNHNAQALNTLVKQLSSKFGAISSVLNDILSRLDPPEAEVQIDRLITGRLQSLQTYVTQQLIRAAEIRASANLAATKMSECVLGQSKRVDFCGKGYHLMSFPQSAPHGVVFLHVTYVPAQEKNFTTAPAICHDGKAHFPREGVFVSNGTHWFVTQRNFYEPQIITTDNTFVSGNCDVVIGIVNNTVYDPLQPELDSFKEELDKYFKNHTSPDVDLGDISGINASVVNIQKEIDRLNEVAKNLNESLIDLQELGKYEQYIKWPWYIWLGFIAGLIAIVMVTIMLCCMTSCCSCLKGCCSCGSCCKFDEDDSEPVLKGVKLHYT

SEQ ID NO: 220 - protein, 1257 aa, synthetic construct; identical to SEQ ID NO: 186

SEQ ID NO: 221 - protein, 1255 aa, synthetic construct; identical to SEQ ID NO: 190

SEQ ID NO: 222 - protein, 1255 aa, synthetic construct; identical to SEQ ID NO: 192

SEQ ID NO: 223 - protein, 1257 aa, synthetic construct
QCVNLITRTQSYTNSFTRGVYYPDKVFRSSVLHSTQDLFLPFFSNVTWFHAIHVSGTNGTKRFDNPVLPFNDGVYFASTEKSNIIRGWIFGTTLDSKTQSLLIVNNATNVVIKVCEFQFCNDPFLDVYYHENNKSRMESELRVYSSANNCTFEYVSQPFLMDLEGKQGNFKNLREFVFKNIDGYFKIYSKHTPVNLGRDLPQGFSALEPLVDLPIGINITRFQTLLALHRSYLTPGDSSSSWTAGAAAYYVGYLQPRTFLLKYNENGTITDAVDCALDPLSETKCTLKSFTVEKGIYQTSNFRVQPTESIVRFPNITNLCPFHEVFNATRFASVYAWNRKRISNCVADYSVLYNFAPFFAFKCYGVSPTKLNDLCFTNVYADSFVIRGNEVSQIAPGQTGNIADYNYKLPDDFTGCVIAWNSNKLDSKVSGNYNYLYRLFRKSKLKPFERDISTEIYQAGNKPCNGVAGFNCYFPLQSYGFRPTYGVGHQPYRVVVLSFELLHAPATVCGPKKSTNLVKNKCVNFNFNGLTGTGVLTESNKKFLPFQQFGRDIADTTDAVRDPQTLEILDITPCSFGGVSVITPGTNTSNQVAVLYQGVNCTEVPVAIHADQLTPTWRVYSTGSNVFQTRAGCLIGAEYVNNSYECDIPIGAGICASYQTQTKSHQQAQSVASQSIIAYTMSLGAENSVAYSNNSIAIPTNFTISVTTEILPVSMTKTSVDCTMYICGDSTECSNLLLQYGSFCTQLKRALTGIAVEQDKNTQEVFAQVKQIYKTPPIKYFGGFNFSQILPDPSKPSKRSFIEDLLFNKVTLADAGFIKQYGDCLGDIAARDLICAQKFNGLTVLPPLLTDEMIAQYTSALLAGTITSGWTFGAGAALQIPFAMQMAYRFNGIGVTQNVLYENQKLIANQFNSAIGKIQDSLSSTASALGKLQDVVNHNAQALNTLVKQLSSKFGAISSVLNDILSRLDPPEAEVQIDRLITGRLQSLQTYVTQQLIRAAEIRASANLAATKMSECVLGQSKRVDFCGKGYHLMSFPQSAPHGVVFLHVTYVPAQEKNFTTAPAICHDGKAHFPREGVFVSNGTHWFVTQRNFYEPQIITTDNTFVSGNCDVVIGIVNNTVYDPLQPELDSFKEELDKYFKNHTSPDVDLGDISGINASVVNIQKEIDRLNEVAKNLNESLIDLQELGKYEQYIKWPWYIWLGFIAGLIAIVMVTIMLCCMTSCCSCLKGCCSCGSCCKFDEDDSEPVLKGVKLHYT

SEQ ID NO: 224 - protein, 1257 aa, synthetic construct
QCVNLITRTQSYTNSFTRGVYYPDKVFRSSVLHSTQDLFLPFFSNVTWFHAIHVSGTNGTKRFDNPVLPFNDGVYFASTEKSNIIRGWIFGTTLDSKTQSLLIVNNATNVVIKVCEFQFCNDPFLDVYYHENNKSRMESELRVYSSANNCTFEYVSQPFLMDLEGKQGNFKNLREFVFKNIDGYFKIYSKHTPVNLGRDLPQGFSALEPLVDLPIGINITRFQTLLALHRSYLTPGDSSSSWTAGAAAYYVGYLQPRTFLLKYNENGTITDAVDCALDPLSETKCTLKSFTVEKGIYQTSNFRVQPTESIVRFPNITNLCPFHEVFNATTFASVYAWNRKRISNCVADYSVLYNFAPFFAFKCYGVSPTKLNDLCFTNVYADSFVIRGNEVSQIAPGQTGNIADYNYKLPDDFTGCVIAWNSNKLDSKVSGNYNYRYRLFRKSKLKPFERDISTEIYQAGNKPCNGVAGSNCYFPLQSYGFRPTYGVGHQPYRVVVLSFELLHAPATVCGPKKSTNLVKNKCVNFNFNGLTGTGVLTESNKKFLPFQQFGRDIADTTDAVRDPQTLEILDITPCSFGGVSVITPGTNISNQVAVLYQGVNCTEVPVAIHADQLTPTWRVYSTGSNVFQTRAGCLIGAEYVNNSYECDIPIGAGICASYQTQTKSHQQAQSVASQSIIAYTMSLGAENSVAYSNNSIAIPTNFTISVTTEILPVSMTKTSVDCTMYICGDSTECSNLLLQYGSFCTQLKRALTGIAVEQDKNTQEVFAQVKQIYKTPPIKYFGGFNFSQILPDPSKPSKRSFIEDLLFNKVTLADAGFIKQYGDCLGDIAARDLICAQKFNGLTVLPPLLTDEMIAQYTSALLAGTITSGWTFGAGAALQIPFAMQMAYRFNGIGVTQNVLYENQKLIANQFNSAIGKIQDSLSSTASALGKLQDVVNHNAQALNTLVKQLSSKFGAISSVLNDILSRLDPPEAEVQIDRLITGRLQSLQTYVTQQLIRAAEIRASANLAATKMSECVLGQSKRVDFCGKGYHLMSFPQSAPHGVVFLHVTYVPAQEKNFTTAPAICHDGKAHFPREGVFVSNGTHWFVTQRNFYEPQIITTDNTFVSGNCDVVIGIVNNTVYDPLQPELDSFKEELDKYFKNHTSPDVDLGDISGINASVVNIQKEIDRLNEVAKNLNESLINLQELGKYEQYIKWPWYIWLGFIAGLIAIVMVTIMLCCMTSCCSCLKGCCSCGSCCKFDEDDSEPVLKGVKLHYT

SEQ ID NO: 225 - protein, 1255 aa, synthetic construct
QCVNLITRTQSYTNSFTRGVYYPDKVFRSSVLHSTQDLFLPFFSNVTWFHAISGTNGTKRFDNPVLPFNDGVYFASTEKSNIIRGWIFGTTLDSKTQSLLIVNNATNVVIKVCEFQFCNDPFLDVYYHKNNKSWMESEFRVYSSANNCTFEYVSQPFLMDLEGKQGNFKNLREFVFKNIDGYFKIYSKHTPINLGRDLPQGFSALEPLVDLPIGINITRFQTLLALHRSYLTPGDSSSGWTAGAAAYYVGYLQPRTFLLKYNENGTITDAVDCALDPLSETKCTLKSFTVEKGIYQTSNFRVQPTESIVRFPNITNLCPFDEVFNATTFASVYAWNRKRISNCVADYSVLYNFAPFFAFKCYGVSPTKLNDLCFTNVYADSFVIRGNEVSQIAPGQTGNIADYNYKLPDDFTGCVIAWNSNKLDSKVGGNYNYRYRLFRKSNLKPFERDISTEIYQAGNKPCNGVAGVNCYFPLQSYGFRPTYGVGHQPYRVVVLSFELLHAPATVCGPKKSTNLVKNKCVNFNFNGLTGTGVLTESNKKFLPFQQFGRDIADTTDAVRDPQTLEILDITPCSFGGVSVITPGTNTSNQVAVLYQGVNCTEVPVAIHADQLTPTWRVYSTGSNVFQTRAGCLIGAEYVNSSYECDIPIGAGICASYQTQTKSHQQAQSVASQSIIAYTMSLGAENSVAYSNNSIAIPTNFTISVTTEILPVSMTKTSVDCTMYICGDSTECSNLLLQYGSFCTQLKRALTGIAVEQDKNTQEVFAQVKQIYKTPPIKYFGGFNFSQILPDPSKPSKRSFIEDLLFNKVTLADAGFIKQYGDCLGDIAARDLICAQKFNGLTVLPPLLTDEMIAQYTSALLAGTITSGWTFGAGAALQIPFAMQMAYRFNGIGVTQNVLYENQKLIANQFNSAIGKIQDSLSSTASALGKLQDVVNHNAQALNTLVKQLSSKFGAISSVLNDILSRLDPPEAEVQIDRLITGRLQSLQTYVTQQLIRAAEIRASANLAATKMSECVLGQSKRVDFCGKGYHLMSFPQSAPHGVVFLHVTYVPAQEKNFTTAPAICHDGKAHFPREGVFVSNGTHWFVTQRNFYEPQIITTDNTFVSGNCDVVIGIVNNTVYDPLQPELDSFKEELDKYFKNHTSPDVDLGDISGINASVVNIQKEIDRLNEVAKNLNESLIDLQELGKYEQYIKWPWYIWLGFIAGLIAIVMVTIMLCCMTSCCSCLKGCCSCGSCCKFDEDDSEPVLKGVKLHYT

SEQ ID NO: 226 - protein, 1255 aa, synthetic construct
QCVNLITRTQSYTNSFTRGVYYPDKVFRSSVLHSTQDLFLPFFSNVTWFHAISGTNGTKRFDNPVLPFNDGVYFASTEKSNIIRGWIFGTTLDSKTQSLLIVNNATNVVIKVCEFQFCNDPFLDVYYHKNNKSWMESEFRVYSSANNCTFEYVSQPFLMDLEGKQGNFKNLREFVFKNIDGYFKIYSKHTPINLGRDLPQGFSALEPLVDLPIGINITRFQTLLALHRSYLTPGDSSSGWTAGAAAYYVGYLQPRTFLLKYNENGTITDAVDCALDPLSETKCTLKSFTVEKGIYQTSNFRVQPTESIVRFPNITNLCPFDEVFNATTFASVYAWNRKRISNCVADYSVLYNFAPFFAFKCYGVSPTKLNDLCFTNVYADSFVIRGNEVSQIAPGQTGNIADYNYKLPDDFTGCVIAWNSNKLDSKVGGNYNYRYRLFRKSNLKPFERDISTEIYQAGNKPCNGVAGVNCYFPLQSYGFRPTYGVGHQPYRVVVLSFELLHAPATVCGPKKSTNLVKNKCVNFNFNGLTGTGVLTESNKKFLPFQQFGRDIADTTDAVRDPQTLEILDITPCSFGGVSVITPGTNTSNQVAVLYQGVNCTEVPVAIHADQLTPTWRVYSTGSNVFQTRAGCLIGAEYVNNSYECDIPIGAGICASYQTQTKSHQQAQSVASQSIIAYTMSLGAENSVAYSNNSIAIPTNFTISVTTEILPVSMTKTSVDCTMYICGDSTECSNLLLQYGSFCTQLKRALTGIAVEQDKNTQEVFAQVKQIYKTPPIKYFGGFNFSQILPDPSKPSKRSFIEDLLFNKVTLADAGFIKQYGDCLGDIAARDLICAQKFNGLTVLPPLLTDEMIAQYTSALLAGTITSGWTFGAGAALQIPFAMQMAYRFNGIGVTQNVLYENQKLIANQFNSAIGKIQDSLSSTASALGKLQDVVNHNAQALNTLVKQLSSKFGAISSVLNDILSRLDPPEAEVQIDRLITGRLQSLQTYVTQQLIRAAEIRASANLAATKMSECVLGQSKRVDFCGKGYHLMSFPQSAPHGVVFLHVTYVPAQEKNFTTAPAICHDGKAHFPREGVFVSNGTHWFVTQRNFYEPQIITTDNTFVSGNCDVVIGIVNNTVYDPLQPELDSFKEELDKYFKNHTSPDVDLGDISGINASVVNIQKEIDRLNEVAKNLNESLIDLQELGKYEQYIKWPWYIWLGFIAGLIAIVMVTIMLCCMTSCCSCLKGCCSCGSCCKFDEDDSEPVLKGVKLHYT

SEQ ID NO: 227 - protein, 1255 aa, synthetic construct
QCVNLITRTQSYTNSFTRGVYYPDKVFRSSVLHSTQDLFLPFFSNVTWFHAISGTNGTKRFDNPVLPFNDGVYFASTEKSNIIRGWIFGTTLDSKTQSLLIVNNATNVVIKVCEFQFCNDPFLDVYYHKNNKSWMESEFRVYSSANNCTFEYVSQPFLMDLEGKQGNFKNLREFVFKNIDGYFKIYSKHTPINLGRDLPQGFSALEPLVDLPIGINITRFQTLLALHRSYLTPGDSSSGWTAGAAAYYVGYLQPRTFLLKYNENGTITDAVDCALDPLSETKCTLKSFTVEKGIYQTSNFRVQPTESIVRFPNITNLCPFDEVFNATTFASVYAWNRKRISNCVADYSVLYNFAPFFAFKCYGVSPTKLNDLCFTNVYADSFVIRGNEVSQIAPGQTGNIADYNYKLPDDFTGCVIAWNSNKLDSTVGGNYNYRYRLFRKSKLKPFERDISTEIYQAGNKPCNGVAGVNCYFPLQSYGFRPTYGVGHQPYRVVVLSFELLHAPATVCGPKKSTNLVKNKCVNFNFNGLTGTGVLTESNKKFLPFQQFGRDIADTTDAVRDPQTLEILDITPCSFGGVSVITPGTNTSNQVAVLYQGVNCTEVPVAIHADQLTPTWRVYSTGSNVFQTRAGCLIGAEYVNNSYECDIPIGAGICASYQTQTKSHQQAQSVASQSIIAYTMSLGAENSVAYSNNSIAIPTNFTISVTTEILPVSMTKTSVDCTMYICGDSTECSNLLLQYGSFCTQLKRALTGIAVEQDKNTQEVFAQVKQIYKTPPIKYFGGFNFSQILPDPSKPSKRSFIEDLLFNKVTLADAGFIKQYGDCLGDIAARDLICAQKFNGLTVLPPLLTDEMIAQYTSALLAGTITSGWTFGAGAALQIPFAMQMAYRFNGIGVTQNVLYENQKLIANQFNSAIGKIQDSLSSTASALGKLQDVVNHNAQALNTLVKQLSSKFGAISSVLNDILSRLDPPEAEVQIDRLITGRLQSLQTYVTQQLIRAAEIRASANLAATKMSECVLGQSKRVDFCGKGYHLMSFPQSAPHGVVFLHVTYVPAQEKNFTTAPAICHDGKAHFPREGVFVSNGTHWFVTQRNFYEPQIITTDNTFVSGNCDVVIGIVNNTVYDPLQPELDSFKEELDKYFKNHTSPDVDLGDISGINASVVNIQKEIDRLNEVAKNLNESLIDLQELGKYEQYIKWPWYIWLGFIAGLIAIVMVTIMLCCMTSCCSCLKGCCSCGSCCKFDEDDSEPVLKGVKLHYT

SEQ ID NO: 228 - protein, 1255 aa, synthetic construct
QCVNLITRTQSYTNSFTRGVYYPDKVFRSSVLHSTQDLFLPFFSNVTWFHAISGTNGTKRFDNPVLPFNDGVYFASTEKSNIIRGWIFGTTLDSKTQSLLIVNNATNVVIKVCEFQFCNDPFLDVYYHKNNKSWMESEFRVYSSANNCTFEYVSQPFLMDLEGKQGNFKNLREFVFKNIDGYFKIYSKHTPINLGRDLPQGFSALEPLVDLPIGINITRFQTLLALHRSYLTPGDSSSGWTAGAAAYYVGYLQPRTFLLKYNENGTITDAVDCALDPLSETKCTLKSFTVEKGIYQTSNFRVQPTESIVRFPNITNLCPFDEVFNATRFASVYAWNRKRISNCVADYSVLYNFAPFFAFKCYGVSPTKLNDLCFTNVYADSFVIRGNEVSQIAPGQTGNIADYNYKLPDDFTGCVIAWNSNKLDSTVGGNYNYRYRLFRKSKLKPFERDISTEIYQAGNKPCNGVAGVNCYFPLQSYGFRPTYGVGHQPYRVVVLSFELLHAPATVCGPKKSTNLVKNKCVNFNFNGLTGTGVLTESNKKFLPFQQFGRDIADTTDAVRDPQTLEILDITPCSFGGVSVITPGTNTSNQVAVLYQGVNCTEVPVAIHADQLTPTWRVYSTGSNVFQTRAGCLIGAEYVNNSYECDIPIGAGICASYQTQTKSHQQAQSVASQSIIAYTMSLGAENSVAYSNNSIAIPTNFTISVTTEILPVSMTKTSVDCTMYICGDSTECSNLLLQYGSFCTQLKRALTGIAVEQDKNTQEVFAQVKQIYKTPPIKYFGGFNFSQILPDPSKPSKRSFIEDLLFNKVTLADAGFIKQYGDCLGDIAARDLICAQKFNGLTVLPPLLTDEMIAQYTSALLAGTITSGWTFGAGAALQIPFAMQMAYRFNGIGVTQNVLYENQKLIANQFNSAIGKIQDSLSSTASALGKLQDVVNHNAQALNTLVKQLSSKFGAISSVLNDILSRLDPPEAEVQIDRLITGRLQSLQTYVTQQLIRAAEIRASANLAATKMSECVLGQSKRVDFCGKGYHLMSFPQSAPHGVVFLHVTYVPAQEKNFTTAPAICHDGKAHFPREGVFVSNGTHWFVTQRNFYEPQIITTDNTFVSGNCDVVIGIVNNTVYDPLQPELDSFKEELDKYFKNHTSPDVDLGDISGINASVVNIQKEIDRLNEVAKNLNESLIDLQELGKYEQYIKWPWYIWLGFIAGLIAIVMVTIMLCCMTSCCSCLKGCCSCGSCCKFDEDDSEPVLKGVKLHYT

SEQ ID NO: 229 - protein, 1267 aa, synthetic construct
MFVFLVLLPLVSSQCVNLITRTQSYTNSFTRGVYYPDKVFRSSVLHSTQDLFLPFFSNVTWFHAISGTNGTKRFDNPVLPFNDGVYFASTEKSNIIRGWIFGTTLDSKTQSLLIVNNATNVVIKVCEFQFCNDPFLDVYQKNNKSWMESEFRVYSSANNCTFEYVSQPFLMDLEGKEGNFKNLREFVFKNIDGYFKIYSKHTPINLERDLPQGFSALEPLVDLPIGINITRFQTLLALHRSYLTPGDSSSGWTAGAAAYYVGYLQPRTFLLKYNENGTITDAVDCALDPLSETKCTLKSFTVEKGIYQTSNFRVQPTESIVRFPNITNLCPFHEVFNATTFASVYAWNRKRISNCVADYSVIYNFAPFFAFKCYGVSPTKLNDLCFTNVYADSFVIRGNEVSQIAPGQTGNIADYNYKLPDDFTGCVIAWNSNKLDSKPSGNYNYLYRLFRKSKLKPFERDISTEIYQAGNKPCNGVAGSNCYSPLQSYGFRPTYGVGHQPYRVVVLSFELLHAPATVCGPKKSTNLVKNKCVNFNFNGLTGTGVLTESNKKFLPFQQFGRDIADTTDAVRDPQTLEILDITPCSFGGVSVITPGTNTSNQVAVLYQGVNCTEVPVAIHADQLTPTWRVYSTGSNVFQTRAGCLIGAEYVNNSYECDIPIGAGICASYQTQTKSHQQAQSVASQSIIAYTMSLGAENSVAYSNNSIAIPTNFTISVTTEILPVSMTKTSVDCTMYICGDSTECSNLLLQYGSFCTQLKRALTGIAVEQDKNTQEVFAQVKQIYKTPPIKYFGGFNFSQILPDPSKPSKRSFIEDLLFNKVTLADAGFIKQYGDCLGDIAARDLICAQKFNGLTVLPPLLTDEMIAQYTSALLAGTITSGWTFGAGAALQIPFAMQMAYRFNGIGVTQNVLYENQKLIANQFNSAIGKIQDSLSSTASALGKLQDVVNHNAQALNTLVKQLSSKFGAISSVLNDILSRLDPPEAEVQIDRLITGRLQSLQTYVTQQLIRAAEIRASANLAATKMSECVLGQSKRVDFCGKGYHLMSFPQSAPHGVVFLHVTYVPAQEKNFTTAPAICHDGKAHFPREGVFVSNGTHWFVTQRNFYEPQIITTDNTFVSGNCDVVIGIVNNTVYDPLQPELDSFKEELDKYFKNHTSPDVDLGDISGINASVVNIQKEIDRLNEVAKNLNESLIDLQELGKYEQYIKWPWYIWLGFIAGLIAIVMVTIMLCCMTSCCSCLKGCCSCGSCCKFDEDDSEPVLKGVKLHYT

SEQ ID NO: 230 - protein, 1269 aa, synthetic construct
MFVFLVLLPLVSSQCVNLITRTQSYTNSFTRGVYYPDKVFRSSVLHSTQDLFLPFFSNVTWFHAIHVSGTNGTKRFDNPALPFNDGVYFASTEKSNIIRGWIFGTTLDSKTQSLLIVNNATNVVIKVCEFQFCNDPFLDVYQKNNKSWMESEFRVYSSANNCTFEYVSQPFLMDLEGKEGNFKNLREFVFKNIDGYFKIYSKHTPINLERDLPQGFSALEPLVDLPIGINITRFQTLLALHRSYLTPVDSSSGWTAGAAAYYVGYLQPRTFLLKYNENGTITDAVDCALDPLSETKCTLKSFTVEKGIYQTSNFRVQPTESIVRFPNITNLCPFHEVFNATTFASVYAWNRKRISNCVADYSVIYNFAPFFAFKCYGVSPTKLNDLCFTNVYADSFVIRGNEVSQIAPGQTGNIADYNYKLPDDFTGCVIAWNSNKLDSKPSGNYNYLYRLFRKSKLKPFERDISTEIYQAGNKPCNGVAGSNCYSPLQSYGFRPTYGVGHQPYRVVVLSFELLHAPATVCGPKKSTNLVKNKCVNFNFNGLTGTGVLTESNKKFLPFQQFGRDIADTTDAVRDPQTLEILDITPCSFGGVSVITPGTNTSNQVAVLYQGVNCTEVPVAIHADQLTPTWRVYSTGSNVFQTRAGCLIGAEYVNNSYECDIPIGAGICASYQTQTKSHQQAQSVASQSIIAYTMSLGAENSVAYSNNSIAIPTNFTISVTTEILPVSMTKTSVDCTMYICGDSTECSNLLLQYGSFCTQLKRALTGIAVEQDKNTQEVFAQVKQIYKTPPIKYFGGFNFSQILPDPSKPSKRSFIEDLLFNKVTLADAGFIKQYGDCLGDIAARDLICAQKFNGLTVLPPLLTDEMIAQYTSALLAGTITSGWTFGAGAALQIPFAMQMAYRFNGIGVTQNVLYENQKLIANQFNSAIGKIQDSLSSTASALGKLQDVVNHNAQALNTLVKQLSSKFGAISSVLNDILSRLDPPEAEVQIDRLITGRLQSLQTYVTQQLIRAAEIRASANLAATKMSECVLGQSKRVDFCGKGYHLMSFPQSAPHGVVFLHVTYVPAQEKNFTTAPAICHDGKAHFPREGVFVSNGTHWFVTQRNFYEPQIITTDNTFVSGNCDVVIGIVNNTVYDPLQPELDSFKEELDKYFKNHTSPDVDLGDISGINASVVNIQKEIDRLNEVAKNLNESLIDLQELGKYEQYIKWPWYIWLGFIAGLIAIVMVTIMLCCMTSCCSCLKGCCSCGSCCKFDEDDSEPVLKGVKLHYT

SEQ ID NO: 231 - protein, 1267 aa, synthetic construct
MFVFLVLLPLVSSQCVNLITRTQSYTNSFTRGVYYPDKVFRSSVLHSTQDLFLPFFSNVTWFHAISGTNGTKRFDNPVLPFNDGVYFASTEKSNIIRGWIFGTTLDSKTQSLLIVNNATNVVIKVCEFQFCNDPFLDVYHKNNKSWMESEFRVYSSANNCTFEYVSQPFLMDLEGKQGNFKNLREFVFKNIDGYFKIYSKHTPINLGRDLPQGFSALEPLVDLPIGINITRFQTLLALHRSYLTPGDSSSGWTAGAAAYYVGYLQPRTFLLKYNENGTITDAVDCALDPLSETKCTLKSFTVEKGIYQTSNFRVQPTESIVRFPNITNLCPFDEVFNATTFASVYAWNRKRISNCVADYSVLYNFAPFFAFKCYGVSPTKLNDLCFTNVYADSFVIRGNEVSQIAPGQTGNIADYNYKLPDDFTGCVIAWNSNKLDSKVGGNYNYRYRLFRKSNLKPFERDISTEIYQAGNKPCNGVAGVNCYFPLQSYGFRPTYGVGHQPYRVVVLSFELLHAPATVCGPKKSTNLVKNKCVNFNFNGLTGTGVLTESNKKFLPFQQFGRDIADTTDAVRDPQTLEILDITPCSFGGVSVITPGTNTSNQVAVLYQGVNCTEVPVAIHADQLTPTWRVYSTGSNVFQTRAGCLIGAEYVNNSYECDIPIGAGICASYQTQTKSHQQAQSVASQSIIAYTMSLGAENSVAYSNNSIAIPTNFTISVTTEILPVSMTKTSVDCTMYICGDSTECSNLLLQYGSFCTQLKRALTGIAVEQDKNTQEVFAQVKQIYKTPPIKYFGGFNFSQILPDPSKPSKRSFIEDLLFNKVTLADAGFIKQYGDCLGDIAARDLICAQKFNGLTVLPPLLTDEMIAQYTSALLAGTITSGWTFGAGAALQIPFAMQMAYRFNGIGVTQNVLYENQKLIANQFNSAIGKIQDSLSSTASALGKLQDVVNHNAQALNTLVKQLSSKFGAISSVLNDILSRLDPPEAEVQIDRLITGRLQSLQTYVTQQLIRAAEIRASANLAATKMSECVLGQSKRVDFCGKGYHLMSFPQSAPHGVVFLHVTYVPAQEKNFTTAPAICHDGKAHFPREGVFVSNGTHWFVTQRNFYEPQIITTDNTFVSGNCDVVIGIVNNTVYDPLQPELDSFKEELDKYFKNHTSPDVDLGDISGINASVVNIQKEIDRLNEVAKNLNESLIDLQELGKYEQYIKWPWYIWLGFIAGLIAIVMVTIMLCCMTSCCSCLKGCCSCGSCCKFDEDDSEPVLKGVKLHYT

SEQ ID NO: 232 - protein, 1270 aa, synthetic construct
MFVFLVLLPLVSSQCVNLITRTQSYTNSFTRGVYYPDKVFRSSVLHSTQDLFLPFFSNVTWFHAIHVSGTNGTKRFDNPVLPFNDGVYFASTEKSNIIRGWIFGTTLDSKTQSLLIVNNATNVVIKVCEFQFCNDPFLDVYYHXNNKSRMESELRVYSSANNCTFEYVSQPFLMDLEGKQGNFKNLREFVFKNIDGYFKIYSKHTPVNLGRDLPQGFSALEPLVDLPIGINITRFQTLLALHRSYLTPGDSSSSWTAGAAAYYVGYLQPRTFLLKYNENGTITDAVDCALDPLSETKCTLKSFTVEKGIYQTSNFRVQPTESIVRFPNITNLCPFHEVFNATTFASVYAWNRTRISNCVADYSVLYNFAPFFAFKCYGVSPTKLNDLCFTNVYADSFVIRGNEVSQIAPGQTGNIADYNYKLPDDFTGCVIAWNSNKLDSKVSGNYNYLYRLFRKSKLKPFERDISTEIYQAGNKPCNGVAGFNCYSPLQSYGFRPTYGVGHQPYRVVVLSFELLHAPATVCGPKKSTNLVKNKCVNFNFNGLTGTGVLTESNKKFLPFQQFGRDIADTTDAVRDPQTLEILDITPCSFGGVSVITPGTNTSNQVAVLYQGVNCTEVPVAIHADQLTPTWRVYSTGSNVFQTRAGCLIGAEYVNNSYECDIPIGAGICASYQTQTKSHQQAQSVASQSIIAYTMSLGAENSVAYSNNSIAIPTNFTISVTTEILPVSMTKTSVDCTMYICGDSTECSNLLLQYGSFCTQLKRALTGIAVEQDKNTQEVFAQVKQIYKTPPIKYFGGFNFSQILPDPSKPSKRSFIEDLLFNKVTLADAGFIKQYGDCLGDIAARDLICAQKFNGLTVLPPLLTDEMIAQYTSALLAGTITSGWTFGAGAALQIPFAMQMAYRFNGIGVTQNVLYENQKLIANQFNSAIGKIQDSLSSTASALGKLQDVVNHNAQALNTLVKQLSSKFGAISSVLNDILSRLDPPEAEVQIDRLITGRLQSLQTYVTQQLIRAAEIRASANLAATKMSECVLGQSKRVDFCGKGYHLMSFPQSAPHGVVFLHVTYVPAQEKNFTTAPAICHDGKAHFPREGVFVSNGTHWFVTQRNFYEPQIITTDNTFVSGNCDVVIGIVNNTVYDPLQPELDSFKEELDKYFKNHTSPDVDLGDISGINASVVNIQKEIDRLNEVAKNLNESLIDLQELGKYEQYIKWPWYIWLGFIAGLIAIVMVTIMLCCMTSCCSCLKGCCSCGSCCKFDEDDSEPVLKGVKLHYT

SEQ ID NO: 233 - protein, 1254 aa, synthetic construct
QCVNLITRTQSYTNSFTRGVYYPDKVFRSSVLHSTQDLFLPFFSNVTWFHAISGTNGTKRFDNPVLPFNDGVYFASTEKSNIIRGWIFGTTLDSKTQSLLIVNNATNVVIKVCEFQFCNDPFLDVYQKNNKSWMESEFRVYSSANNCTFEYVSQPFLMDLEGKEGNFKNLREFVFKNIDGYFKIYSKHTPINLERDLPQGFSALEPLVDLPIGINITRFQTLLALHRSYLTPGDSSSGWTAGAAAYYVGYLQPRTFLLKYNENGTITDAVDCALDPLSETKCTLKSFTVEKGIYQTSNFRVQPTESIVRFPNITNLCPFHEVFNATTFASVYAWNRKRISNCVADYSVIYNFAPFFAFKCYGVSPTKLNDLCFTNVYADSFVIRGNEVSQIAPGQTGNIADYNYKLPDDFTGCVIAWNSNKLDSKPSGNYNYLYRLFRKSKLKPFERDISTEIYQAGNKPCNGVAGSNCYSPLQSYGFRPTYGVGHQPYRVVVLSFELLHAPATVCGPKKSTNLVKNKCVNFNFNGLTGTGVLTESNKKFLPFQQFGRDIADTTDAVRDPQTLEILDITPCSFGGVSVITPGTNTSNQVAVLYQGVNCTEVPVAIHADQLTPTWRVYSTGSNVFQTRAGCLIGAEYVNNSYECDIPIGAGICASYQTQTKSHQQAQSVASQSIIAYTMSLGAENSVAYSNNSIAIPTNFTISVTTEILPVSMTKTSVDCTMYICGDSTECSNLLLQYGSFCTQLKRALTGIAVEQDKNTQEVFAQVKQIYKTPPIKYFGGFNFSQILPDPSKPSKRSFIEDLLFNKVTLADAGFIKQYGDCLGDIAARDLICAQKFNGLTVLPPLLTDEMIAQYTSALLAGTITSGWTFGAGAALQIPFAMQMAYRFNGIGVTQNVLYENQKLIANQFNSAIGKIQDSLSSTASALGKLQDVVNHNAQALNTLVKQLSSKFGAISSVLNDILSRLDPPEAEVQIDRLITGRLQSLQTYVTQQLIRAAEIRASANLAATKMSECVLGQSKRVDFCGKGYHLMSFPQSAPHGVVFLHVTYVPAQEKNFTTAPAICHDGKAHFPREGVFVSNGTHWFVTQRNFYEPQIITTDNTFVSGNCDVVIGIVNNTVYDPLQPELDSFKEELDKYFKNHTSPDVDLGDISGINASVVNIQKEIDRLNEVAKNLNESLIDLQELGKYEQYIKWPWYIWLGFIAGLIAIVMVTIMLCCMTSCCSCLKGCCSCGSCCKFDEDDSEPVLKGVKLHYT

SEQ ID NO: 234 - protein, 1256 aa, synthetic construct
QCVNLITRTQSYTNSFTRGVYYPDKVFRSSVLHSTQDLFLPFFSNVTWFHAIHVSGTNGTKRFDNPALPFNDGVYFASTEKSNIIRGWIFGTTLDSKTQSLLIVNNATNVVIKVCEFQFCNDPFLDVYQKNNKSWMESEFRVYSSANNCTFEYVSQPFLMDLEGKEGNFKNLREFVFKNIDGYFKIYSKHTPINLERDLPQGFSALEPLVDLPIGINITRFQTLLALHRSYLTPVDSSSGWTAGAAAYYVGYLQPRTFLLKYNENGTITDAVDCALDPLSETKCTLKSFTVEKGIYQTSNFRVQPTESIVRFPNITNLCPFHEVFNATTFASVYAWNRKRISNCVADYSVIYNFAPFFAFKCYGVSPTKLNDLCFTNVYADSFVIRGNEVSQIAPGQTGNIADYNYKLPDDFTGCVIAWNSNKLDSKPSGNYNYLYRLFRKSKLKPFERDISTEIYQAGNKPCNGVAGSNCYSPLQSYGFRPTYGVGHQPYRVVVLSFELLHAPATVCGPKKSTNLVKNKCVNFNFNGLTGTGVLTESNKKFLPFQQFGRDIADTTDAVRDPQTLEILDITPCSFGGVSVITPGTNTSNQVAVLYQGVNCTEVPVAIHADQLTPTWRVYSTGSNVFQTRAGCLIGAEYVNNSYECDIPIGAGICASYQTQTKSHQQAQSVASQSIIAYTMSLGAENSVAYSNNSIAIPTNFTISVTTEILPVSMTKTSVDCTMYICGDSTECSNLLLQYGSFCTQLKRALTGIAVEQDKNTQEVFAQVKQIYKTPPIKYFGGFNFSQILPDPSKPSKRSFIEDLLFNKVTLADAGFIKQYGDCLGDIAARDLICAQKFNGLTVLPPLLTDEMIAQYTSALLAGTITSGWTFGAGAALQIPFAMQMAYRFNGIGVTQNVLYENQKLIANQFNSAIGKIQDSLSSTASALGKLQDVVNHNAQALNTLVKQLSSKFGAISSVLNDILSRLDPPEAEVQIDRLITGRLQSLQTYVTQQLIRAAEIRASANLAATKMSECVLGQSKRVDFCGKGYHLMSFPQSAPHGVVFLHVTYVPAQEKNFTTAPAICHDGKAHFPREGVFVSNGTHWFVTQRNFYEPQIITTDNTFVSGNCDVVIGIVNNTVYDPLQPELDSFKEELDKYFKNHTSPDVDLGDISGINASVVNIQKEIDRLNEVAKNLNESLIDLQELGKYEQYIKWPWYIWLGFIAGLIAIVMVTIMLCCMTSCCSCLKGCCSCGSCCKFDEDDSEPVLKGVKLHYT

SEQ ID NO: 235 - protein, 1254 aa, synthetic construct
QCVNLITRTQSYTNSFTRGVYYPDKVFRSSVLHSTQDLFLPFFSNVTWFHAISGTNGTKRFDNPVLPFNDGVYFASTEKSNIIRGWIFGTTLDSKTQSLLIVNNATNVVIKVCEFQFCNDPFLDVYHKNNKSWMESEFRVYSSANNCTFEYVSQPFLMDLEGKQGNFKNLREFVFKNIDGYFKIYSKHTPINLGRDLPQGFSALEPLVDLPIGINITRFQTLLALHRSYLTPGDSSSGWTAGAAAYYVGYLQPRTFLLKYNENGTITDAVDCALDPLSETKCTLKSFTVEKGIYQTSNFRVQPTESIVRFPNITNLCPFDEVFNATTFASVYAWNRKRISNCVADYSVLYNFAPFFAFKCYGVSPTKLNDLCFTNVYADSFVIRGNEVSQIAPGQTGNIADYNYKLPDDFTGCVIAWNSNKLDSKVGGNYNYRYRLFRKSNLKPFERDISTEIYQAGNKPCNGVAGVNCYFPLQSYGFRPTYGVGHQPYRVVVLSFELLHAPATVCGPKKSTNLVKNKCVNFNFNGLTGTGVLTESNKKFLPFQQFGRDIADTTDAVRDPQTLEILDITPCSFGGVSVITPGTNTSNQVAVLYQGVNCTEVPVAIHADQLTPTWRVYSTGSNVFQTRAGCLIGAEYVNNSYECDIPIGAGICASYQTQTKSHQQAQSVASQSIIAYTMSLGAENSVAYSNNSIAIPTNFTISVTTEILPVSMTKTSVDCTMYICGDSTECSNLLLQYGSFCTQLKRALTGIAVEQDKNTQEVFAQVKQIYKTPPIKYFGGFNFSQILPDPSKPSKRSFIEDLLFNKVTLADAGFIKQYGDCLGDIAARDLICAQKFNGLTVLPPLLTDEMIAQYTSALLAGTITSGWTFGAGAALQIPFAMQMAYRFNGIGVTQNVLYENQKLIANQFNSAIGKIQDSLSSTASALGKLQDVVNHNAQALNTLVKQLSSKFGAISSVLNDILSRLDPPEAEVQIDRLITGRLQSLQTYVTQQLIRAAEIRASANLAATKMSECVLGQSKRVDFCGKGYHLMSFPQSAPHGVVFLHVTYVPAQEKNFTTAPAICHDGKAHFPREGVFVSNGTHWFVTQRNFYEPQIITTDNTFVSGNCDVVIGIVNNTVYDPLQPELDSFKEELDKYFKNHTSPDVDLGDISGINASVVNIQKEIDRLNEVAKNLNESLIDLQELGKYEQYIKWPWYIWLGFIAGLIAIVMVTIMLCCMTSCCSCLKGCCSCGSCCKFDEDDSEPVLKGVKLHYT

SEQ ID NO: 236 - protein, 1257 aa, synthetic construct
QCVNLITRTQSYTNSFTRGVYYPDKVFRSSVLHSTQDLFLPFFSNVTWFHAIHVSGTNGTKRFDNPVLPFNDGVYFASTEKSNIIRGWIFGTTLDSKTQSLLIVNNATNVVIKVCEFQFCNDPFLDVYYHXNNKSRMESELRVYSSANNCTFEYVSQPFLMDLEGKQGNFKNLREFVFKNIDGYFKIYSKHTPVNLGRDLPQGFSALEPLVDLPIGINITRFQTLLALHRSYLTPGDSSSSWTAGAAAYYVGYLQPRTFLLKYNENGTITDAVDCALDPLSETKCTLKSFTVEKGIYQTSNFRVQPTESIVRFPNITNLCPFHEVFNATTFASVYAWNRTRISNCVADYSVLYNFAPFFAFKCYGVSPTKLNDLCFTNVYADSFVIRGNEVSQIAPGQTGNIADYNYKLPDDFTGCVIAWNSNKLDSKVSGNYNYLYRLFRKSKLKPFERDISTEIYQAGNKPCNGVAGFNCYSPLQSYGFRPTYGVGHQPYRVVVLSFELLHAPATVCGPKKSTNLVKNKCVNFNFNGLTGTGVLTESNKKFLPFQQFGRDIADTTDAVRDPQTLEILDITPCSFGGVSVITPGTNTSNQVAVLYQGVNCTEVPVAIHADQLTPTWRVYSTGSNVFQTRAGCLIGAEYVNNSYECDIPIGAGICASYQTQTKSHQQAQSVASQSIIAYTMSLGAENSVAYSNNSIAIPTNFTISVTTEILPVSMTKTSVDCTMYICGDSTECSNLLLQYGSFCTQLKRALTGIAVEQDKNTQEVFAQVKQIYKTPPIKYFGGFNFSQILPDPSKPSKRSFIEDLLFNKVTLADAGFIKQYGDCLGDIAARDLICAQKFNGLTVLPPLLTDEMIAQYTSALLAGTITSGWTFGAGAALQIPFAMQMAYRFNGIGVTQNVLYENQKLIANQFNSAIGKIQDSLSSTASALGKLQDVVNHNAQALNTLVKQLSSKFGAISSVLNDILSRLDPPEAEVQIDRLITGRLQSLQTYVTQQLIRAAEIRASANLAATKMSECVLGQSKRVDFCGKGYHLMSFPQSAPHGVVFLHVTYVPAQEKNFTTAPAICHDGKAHFPREGVFVSNGTHWFVTQRNFYEPQIITTDNTFVSGNCDVVIGIVNNTVYDPLQPELDSFKEELDKYFKNHTSPDVDLGDISGINASVVNIQKEIDRLNEVAKNLNESLIDLQELGKYEQYIKWPWYIWLGFIAGLIAIVMVTIMLCCMTSCCSCLKGCCSCGSCCKFDEDDSEPVLKGVKLHYT

SEQ ID NO: 237 - DNA, 3817 bp, synthetic construct
  source 1..3817: mol_type = other DNA
atgttcgtcttcctggtgctgctgcccctggtgtccagccagtgcgtgaacctgaccactaggactcagctgcctcccgcttacaccaactcattcactcgcggtgtgtactaccctgacaaggtcttccgttcttcagtgctgcactcaactcaggacctgttcctgcccttcttctccaacgtcacctggttccacgtcatctccggcaccaacggcactaagcgcttcgacaacccagtgctgcctttcaacgacggtgtctacttcgcttcaatcgagaagtccaacatcatccgtggatggatcttcggcaccactctggacagcaagactcagtctctgctgatcgtcaacaacgccaccaacgtggtcatcaaggtctgcgaattccagttctgcaacgacccattcctggaccacaagaacaacaagtcatggatggagtccgaattccgcgtctactccagcgctaacaactgcactttcgagtacgtgtcccagcctttcctgatggacctggaaggaaagcagggtaacttcaagaacctgagggagttcgtgttcaagaacatcgacggatacttcaagatctacagcaagcacaccccaatcatcgtgcgcgagcccgaggacctgcctcagggtttctctgctctggagccactggtggacctgcctatcggcatcaacatcacccgcttccagactctgctggctctgcaccgttcctacctgactccaggcgactcatcttctggatggactgctggagctgctgcttactacgtgggctacctgcagcctcgcaccttcctgctgaagtacaacgaaaacggaaccatcactgacgccgtcgactgcgctctggaccctctgtcagaaaccaagtgcactctgaagtccttcaccgtggagaagggcatctaccagacttcaaacttcagggtgcagcccaccgaatccatcgtcagattccctaacatcactaacctgtgccccttcgacgaggtcttcaacgccacccgcttcgcttccgtgtacgcctggaacaggaagagaatctcaaactgcgtcgctgactactccgtgctgtacaacctggcccctttcttcaccttcaagtgctacggcgtgtcaccaactaagctgaacgacctgtgcttcaccaacgtctacgccgactccttcgtgatcaggggagacgaggtcagacagatcgctcctggccagactggaaacatcgccgactacaactacaagctgcccgacgacttcaccggttgcgtcatcgcttggaacagcaacaagctggactctaaggtgagcggcaactacaactacctgtaccgcctgttccgtaagtcaaacctgaagccattcgagagggacatcagcactgaaatctaccaggccggaaacaagccttgcaacggtgtcgccggcttcaactgctacttccccctgaggtcctactctttcaggccaacttacggtgtgggccaccagccttacagagtggtcgtgctgagcttcgaactgctccacgctcctgctactgtgtgcggtccaaagaagtctaccaacctggtcaagaacaagtgcgtgaacttcaacttcaacggcctgaaaggaactggtgtcctgaccgagagcaacaagaagttcctgcccttccagcagttcggaagggacatcgctgacaccactgacgctgtgcgcgaccctcagaccctggaaatcctggacatcactccatgctcattcggaggtgtctccgtgatcacccctggcaccaacacttctaaccaggtcgctgtgctgtaccagggcgtcaactgcaccgaggtccctgtggccatccacgctgaccagctgacccccacttggcgcgtgtactccaccggcagcaacgtgttccagactcgtgctggttgcctgatcggcgccgagtacgtgaacaacagctacgaatgcgacatccccatcggcgctggaatctgcgcctcttaccagacccagactaagagccaccagcaggctcagtctgtggcctctcagtcaatcatcgcttacaccatgtcactgggcgctgaaaactccgtggcctactctaacaactcaatcgccatccccaccaacttcactatcagcgtgaccactgagatcctgccagtcagcatgaccaagacttctgtggactgcactatgtacatctgcggagacagcaccgaatgctctaacctgctgctgcagtacggctctttctgcacccagctgaagcgtgctctgactggaatcgccgtggagcaggacaagaacactcaggaagtcttcgctcaggtgaagcaaatctacaagaccccacctatcaagtacttcggcggattcaacttctcccagatcctgcctgacccctccaagccaagcaagcgctctttcatcgaggacctgctgttcaacaaggtcactctggccgacgctggattcatcaagcagtacggagactgcctgggtgacatcgccgctcgtgacctgatctgcgctcagaagttcaagggtctgaccgtgctgcccccactgctgactgacgaaatgatcgcccagtacactagcgccctgctggctggaaccatcacttctggttggaccttcggtgctggcgccgctctgcagatccctttcgctatgcagatggcctaccgtttcaacggaatcggtgtcacccagaacgtgctgtacgagaaccagaagctgatcgctaaccagttcaactcagccatcggaaagatccaggacagcctgagctctactgcctctgctctgggcaagctgcaggacgtcgtgaaccacaacgcccaggctctgaacaccctggtcaagcagctgtcatccaagttcggtgctatcagctctgtgctgaacgacatcttctcccgcctggaccctcccgaggccgaagtgcagatcgaccgcctgatcactggccgtctgcagtcactgcagacctacgtgactcagcagctgatcagggccgctgaaatcagagcctccgctaacctggccgctaccaagatgagcgagtgcgtcctgggtcaatctaagcgtgtggacttctgcggcaagggataccacctgatgtcattccctcagtctgctccccacggtgtggtgttcctgcacgtcacctacgtgccagcccaggagaagaacttcaccactgcccctgctatctgccacgacggcaaggctcacttccccagggaaggtgtcttcgtgagcaacggcacccactggttcgtcactcagagaaacttctacgagccacagatcatcaccactgacaacactttcgtgtctggaaactgcgacgtggtcatcggtatcgtcaacaacaccgtgtacgaccccctgcagccagagctggactcattcaaggaggaactggacaagtacttcaagaaccacacctcccctgacgtcgacctgggcgacatctcaggaatcaacgcttccgtcgtgaacatccagaaggagatcgaccgcctgaacgaagtggccaagaacctgaacgaaagcctgatcgacctgcaggagctgggcaagtacgaacagtacatcaagtggccttggtacatctggctgggtttcatcgctggcctcatcgctatcgtgatggtgaccatcatgctgtgctgcatgacttcatgctgctcctgcctgaagggctgctgcagctgcggatcttgctgcaagttcgacgaggacgactctgaacccgtcctgaagggcgtgaagctgcactacacctaattaa

SEQ ID NO: 238 - DNA, 3804 bp, synthetic construct
  source 1..3804: mol_type = other DNA
atgttcgtcttcctggtgctgctgcctctggtctccagccagtgcgtgaacctgatcaccaggactcagtcctacaccaacagcttcactagaggtgtgtactaccctgacaaggtcttccgctcttcagtgctgcactctactcaggacctgttcctgcccttcttctcaaacgtcacctggttccacgccatctccggcaccaacggcactaagagattcgacaacccagtgctgcctttcaacgacggcgtctacttcgcttctaccgagaagtcaaacatcatccgcggatggatcttcggcaccactctggactccaagactcagagcctgctgatcgtcaacaacgccaccaacgtggtcatcaaggtgtgcgaattccagttctgcaacgacccattcctggacgtgtaccagaagaacaacaagtcttggatggagtcagaattcagagtctactccagcgctaacaactgcactttcgagtacgtgtctcagcctttcctgatggacctggaaggaaaggagggtaacttcaagaacctgcgtgagttcgtcttcaagaacatcgacggttacttcaagatttactctaagcacaccccaatcaacctggagagggacctgcctcagggcttctcagctctggagccactggtggacctgcctatcggcatcaacatcaccaggttccagactctgctggctctgcacagaagctacctgactccaggagactcatcttctggatggactgctggagctgctgcttactacgtgggttacctgcagcctcgcaccttcctgctgaagtacaacgaaaacggcaccatcactgacgccgtcgactgcgctctggaccctctgtctgaaaccaagtgcactctgaagtcattcaccgtggagaagggcatctaccagacttccaacttccgcgtgcagcccaccgaaagcatcgtccgtttccctaacatcactaacctgtgccccttccacgaggtcttcaacgccaccaccttcgcttctgtgtacgcctggaaccgcaagcgtatctctaactgcgtcgccgactactcagtgatctacaacttcgctcccttcttcgccttcaagtgctacggagtgtcaccaactaagctgaacgacctgtgcttcaccaacgtctacgctgactctttcgtgatcaggggtaacgaggtctcacagatcgctccaggccagactggaaacatcgccgactacaactacaagctgcctgacgacttcaccggttgcgtcatcgcttggaactccaacaagctggacagcaagccctctggcaactacaactacctgtacaggctgttcagaaagtccaagctgaagcccttcgagcgtgacatcagcactgaaatctaccaggctggtaacaagccatgcaacggtgtcgccggctccaactgctactctcccctgcagtcctacggcttccgtccaacctacggtgtgggccaccagccttacagggtggtcgtgctgtccttcgaactcctccacgctccagctactgtgtgcggaccaaagaagagcaccaacctggtcaagaacaagtgcgtgaacttcaacttcaacggtctgaccggaactggtgtcctgaccgagtctaacaagaagttcctgcccttccagcagttcggtcgtgacatcgctgacactaccgacgccgtgagggacccccagaccctggaaatcctggacatcactccatgctctttcggaggtgtctcagtgatcactccaggaaccaacacttcaaaccaggtcgctgtgctgtaccagggtgtcaactgcaccgaagtccctgtggccatccacgctgaccagctgacccccacttggagagtgtacagcaccggctctaacgtcttccagactcgcgctggttgcctgatcggcgccgagtacgtgaacaactcttacgaatgcgacatccccatcggcgctggaatctgcgcctcataccagacccagactaagtcccaccagcaggctcagagcgtcgcctcacagtccatcatcgcttacaccatgtctctgggcgctgaaaactcagtggcctactcaaacaactccatcgccatccctaccaacttcactatctccgtgaccactgagatcctgcccgtctccatgaccaagactagcgtggactgcactatgtacatctgcggagactccaccgaatgcagcaacctgctgctgcagtacggtagcttctgcacccagctgaagcgtgctctgactggcatcgccgtggagcaggacaagaacactcaggaagtcttcgctcaggtgaagcaaatctacaagacccctcccatcaagtacttcggcggattcaacttctcccagatcctgcctgaccccagcaagccatctaagagatcattcatcgaggacctgctgttcaacaaggtcactctggccgacgctggtttcatcaagcagtacggagactgcctgggtgacatcgccgctcgcgacctgatctgcgctcagaagttcaacggcctgaccgtgctgccacctctgctgactgacgaaatgatcgcccagtacacttccgccctgctggctggaaccatcacttctggttggaccttcggtgctggtgctgctctgcagatccctttcgctatgcagatggcctacaggttcaacggaatcggtgtcacccagaacgtgctgtacgagaaccagaagctgatcgctaaccagttcaactccgccatcggcaagatccaggactccctgagctctactgccagcgctctgggaaagctgcaggacgtcgtgaaccacaacgcccaggctctgaacaccctggtcaagcagctgtcatccaagttcggagctatcagctctgtgctgaacgacatcctctcccgcctggaccctcctgaggctgaagtccagatcgacaggctgatcactggtagactgcagtctctgcagacctacgtgactcagcagctgatccgcgccgctgaaatccgtgcctcagctaacctggccgctaccaagatgtctgagtgcgtcctgggccagagcaagagggtggacttctgcggcaagggataccacctgatgtctttccctcagtcagctccccacggagtcgtgttcctgcacgtcacctacgtgccagcccaggagaagaacttcaccactgcccctgctatctgccacgacggcaaggctcacttcccccgtgaaggagtcttcgtgtccaacggcacccactggttcgtcactcagaggaacttctacgagccacagatcatcaccactgacaacactttcgtgagcggcaactgcgacgtggtcatcggtatcgtcaacaacaccgtgtacgaccccctgcagccagagctggactccttcaaggaagagctggacaagtacttcaagaaccacaccagcccagacgtcgacctgggcgacatctctggaatcaacgcttcagtcgtgaacatccagaaggagatcgaccgtctgaacgaagtggccaagaacctgaacgaatctctgatcgacctgcaggagctgggaaagtacgaacagtacatcaagtggccttggtacatctggctgggtttcatcgctggcctcatcgctatcgtgatggtgaccatcatgctgtgctgcatgacttcctgctgcagctgcctgaagggctgctgctcttgcggatcatgctgcaagttcgacgaggacgactcagaacccgtcctgaagggcgtgaagctgcactacacctaa

SEQ ID NO: 239 - DNA, 3810 bp, synthetic construct
  source 1..3810: mol_type = other DNA
atgttcgtcttcctggtgctgctgcctctggtctccagccagtgcgtgaacctgatcaccaggactcagtcctacaccaacagcttcactagaggtgtgtactaccctgacaaggtcttccgctcttcagtgctgcactctactcaggacctgttcctgcccttcttctcaaacgtcacctggttccacgccatccacgtgtccggcaccaacggcactaagagattcgacaacccagctctgcctttcaacgacggcgtctacttcgcttctaccgagaagtcaaacatcatccgcggatggatcttcggcaccactctggactccaagactcagagcctgctgatcgtcaacaacgccaccaacgtggtcatcaaggtgtgcgaattccagttctgcaacgacccattcctggacgtgtaccagaagaacaacaagtcttggatggagtcagaattcagagtctactccagcgctaacaactgcactttcgagtacgtgtctcagcctttcctgatggacctggaaggaaaggagggtaacttcaagaacctgcgtgagttcgtcttcaagaacatcgacggttacttcaagatttactctaagcacaccccaatcaacctggagagggacctgcctcagggcttctcagctctggagccactggtggacctgcctatcggcatcaacatcaccaggttccagactctgctggctctgcacagaagctacctgactccagtggactcatcttctggatggactgctggagctgctgcttactacgtgggttacctgcagcctcgcaccttcctgctgaagtacaacgaaaacggcaccatcactgacgccgtcgactgcgctctggaccctctgtctgaaaccaagtgcactctgaagtcattcaccgtggagaagggcatctaccagacttccaacttccgcgtgcagcccaccgaaagcatcgtccgtttccctaacatcactaacctgtgccccttccacgaggtcttcaacgccaccaccttcgcttctgtgtacgcctggaaccgcaagcgtatctctaactgcgtcgccgactactcagtgatctacaacttcgctcccttcttcgccttcaagtgctacggagtgtcaccaactaagctgaacgacctgtgcttcaccaacgtctacgctgactctttcgtgatcaggggtaacgaggtctcacagatcgctccaggccagactggaaacatcgccgactacaactacaagctgcctgacgacttcaccggttgcgtcatcgcttggaactccaacaagctggacagcaagccctctggcaactacaactacctgtacaggctgttcagaaagtccaagctgaagcccttcgagcgtgacatcagcactgaaatctaccaggctggtaacaagccatgcaacggtgtcgccggctccaactgctactctcccctgcagtcctacggcttccgtccaacctacggtgtgggccaccagccttacagggtggtcgtgctgtccttcgaactcctccacgctccagctactgtgtgcggaccaaagaagagcaccaacctggtcaagaacaagtgcgtgaacttcaacttcaacggtctgaccggaactggtgtcctgaccgagtctaacaagaagttcctgcccttccagcagttcggtcgtgacatcgctgacactaccgacgccgtgagggacccccagaccctggaaatcctggacatcactccatgctctttcggaggtgtctcagtgatcactccaggaaccaacacttcaaaccaggtcgctgtgctgtaccagggtgtcaactgcaccgaagtccctgtggccatccacgctgaccagctgacccccacttggagagtgtacagcaccggctctaacgtcttccagactcgcgctggttgcctgatcggcgccgagtacgtgaacaactcttacgaatgcgacatccccatcggcgctggaatctgcgcctcataccagacccagactaagtcccaccagcaggctcagagcgtcgcctcacagtccatcatcgcttacaccatgtctctgggcgctgaaaactcagtggcctactcaaacaactccatcgccatccctaccaacttcactatctccgtgaccactgagatcctgcccgtctccatgaccaagactagcgtggactgcactatgtacatctgcggagactccaccgaatgcagcaacctgctgctgcagtacggtagcttctgcacccagctgaagcgtgctctgactggcatcgccgtggagcaggacaagaacactcaggaagtcttcgctcaggtgaagcaaatctacaagacccctcccatcaagtacttcggcggattcaacttctcccagatcctgcctgaccccagcaagccatctaagagatcattcatcgaggacctgctgttcaacaaggtcactctggccgacgctggtttcatcaagcagtacggagactgcctgggtgacatcgccgctcgcgacctgatctgcgctcagaagttcaacggcctgaccgtgctgccacctctgctgactgacgaaatgatcgcccagtacacttccgccctgctggctggaaccatcacttctggttggaccttcggtgctggtgctgctctgcagatccctttcgctatgcagatggcctacaggttcaacggaatcggtgtcacccagaacgtgctgtacgagaaccagaagctgatcgctaaccagttcaactccgccatcggcaagatccaggactccctgagctctactgccagcgctctgggaaagctgcaggacgtcgtgaaccacaacgcccaggctctgaacaccctggtcaagcagctgtcatccaagttcggagctatcagctctgtgctgaacgacatcctctcccgcctggaccctcctgaggctgaagtccagatcgacaggctgatcactggtagactgcagtctctgcagacctacgtgactcagcagctgatccgcgccgctgaaatccgtgcctcagctaacctggccgctaccaagatgtctgagtgcgtcctgggccagagcaagagggtggacttctgcggcaagggataccacctgatgtctttccctcagtcagctccccacggagtcgtgttcctgcacgtcacctacgtgccagcccaggagaagaacttcaccactgcccctgctatctgccacgacggcaaggctcacttcccccgtgaaggagtcttcgtgtccaacggcacccactggttcgtcactcagaggaacttctacgagccacagatcatcaccactgacaacactttcgtgagcggcaactgcgacgtggtcatcggtatcgtcaacaacaccgtgtacgaccccctgcagccagagctggactccttcaaggaagagctggacaagtacttcaagaaccacaccagcccagacgtcgacctgggcgacatctctggaatcaacgcttcagtcgtgaacatccagaaggagatcgaccgtctgaacgaagtggccaagaacctgaacgaatctctgatcgacctgcaggagctgggaaagtacgaacagtacatcaagtggccttggtacatctggctgggtttcatcgctggcctcatcgctatcgtgatggtgaccatcatgctgtgctgcatgacttcctgctgcagctgcctgaagggctgctgctcttgcggatcatgctgcaagttcgacgaggacgactcagaacccgtcctgaagggcgtgaagctgcactacacctaa

SEQ ID NO: 240 - DNA, 3804 bp, synthetic construct
  source 1..3804: mol_type = other DNA
atgttcgtcttcctggtgctgctgcctctggtctccagccagtgcgtgaacctgatcaccaggactcagtcctacaccaacagcttcactagaggtgtgtactaccctgacaaggtcttccgctcttcagtgctgcactctactcaggacctgttcctgcccttcttctcaaacgtcacctggttccacgccatctccggcaccaacggcactaagagattcgacaacccagtgctgcctttcaacgacggcgtctacttcgcttctaccgagaagtcaaacatcatccgcggatggatcttcggcaccactctggactccaagactcagagcctgctgatcgtcaacaacgccaccaacgtggtcatcaaggtgtgcgaattccagttctgcaacgacccattcctggacgtgtaccacaagaacaacaagtcttggatggagtcagaattcagagtctactccagcgctaacaactgcactttcgagtacgtgtctcagcctttcctgatggacctggaaggaaagcagggtaacttcaagaacctgcgtgagttcgtcttcaagaacatcgacggttacttcaagatttactctaagcacaccccaatcaacctgggtagggacctgcctcagggcttctcagctctggagccactggtggacctgcctatcggcatcaacatcaccaggttccagactctgctggctctgcacagaagctacctgactccaggagactcatcttctggatggactgctggagctgctgcttactacgtgggttacctgcagcctcgcaccttcctgctgaagtacaacgaaaacggcaccatcactgacgccgtcgactgcgctctggaccctctgtctgaaaccaagtgcactctgaagtcattcaccgtggagaagggcatctaccagacttccaacttccgcgtgcagcccaccgaaagcatcgtccgtttccctaacatcactaacctgtgccccttcgacgaggtcttcaacgccaccaccttcgcttctgtgtacgcctggaaccgcaagcgtatctctaactgcgtcgccgactactcagtgctgtacaacttcgctcccttcttcgccttcaagtgctacggagtgtcaccaactaagctgaacgacctgtgcttcaccaacgtctacgctgactctttcgtgatcaggggtaacgaggtctcacagatcgctccaggccagactggaaacatcgccgactacaactacaagctgcctgacgacttcaccggttgcgtcatcgcttggaactccaacaagctggacagcaaagtgggtggcaactacaactaccgttacaggctgttcagaaagtccaacctgaagcccttcgagcgtgacatcagcactgaaatctaccaggctggtaacaagccatgcaacggtgtcgccggcgtcaactgctacttccccctgcagtcctacggcttccgtccaacctacggtgtgggccaccagccttacagggtggtcgtgctgtccttcgaactcctccacgctccagctactgtgtgcggaccaaagaagagcaccaacctggtcaagaacaagtgcgtgaacttcaacttcaacggtctgaccggaactggtgtcctgaccgagtctaacaagaagttcctgcccttccagcagttcggtcgtgacatcgctgacactaccgacgccgtgagggacccccagaccctggaaatcctggacatcactccatgctctttcggaggtgtctcagtgatcactccaggaaccaacacttcaaaccaggtcgctgtgctgtaccagggtgtcaactgcaccgaagtccctgtggccatccacgctgaccagctgacccccacttggagagtgtacagcaccggctctaacgtcttccagactcgcgctggttgcctgatcggcgccgagtacgtgaacaactcttacgaatgcgacatccccatcggcgctggaatctgcgcctcataccagacccagactaagtcccaccagcaggctcagagcgtcgcctcacagtccatcatcgcttacaccatgtctctgggcgctgaaaactcagtggcctactcaaacaactccatcgccatccctaccaacttcactatctccgtgaccactgagatcctgcccgtctccatgaccaagactagcgtggactgcactatgtacatctgcggagactccaccgaatgcagcaacctgctgctgcagtacggtagcttctgcacccagctgaagcgtgctctgactggcatcgccgtggagcaggacaagaacactcaggaagtcttcgctcaggtgaagcaaatctacaagacccctcccatcaagtacttcggcggattcaacttctcccagatcctgcctgaccccagcaagccatctaagagatcattcatcgaggacctgctgttcaacaaggtcactctggccgacgctggtttcatcaagcagtacggagactgcctgggtgacatcgccgctcgcgacctgatctgcgctcagaagttcaacggcctgaccgtgctgccacctctgctgactgacgaaatgatcgcccagtacacttccgccctgctggctggaaccatcacttctggttggaccttcggtgctggtgctgctctgcagatccctttcgctatgcagatggcctacaggttcaacggaatcggtgtcacccagaacgtgctgtacgagaaccagaagctgatcgctaaccagttcaactccgccatcggcaagatccaggactccctgagctctactgccagcgctctgggaaagctgcaggacgtcgtgaaccacaacgcccaggctctgaacaccctggtcaagcagctgtcatccaagttcggagctatcagctctgtgctgaacgacatcctctcccgcctggaccctcctgaggctgaagtccagatcgacaggctgatcactggtagactgcagtctctgcagacctacgtgactcagcagctgatccgcgccgctgaaatccgtgcctcagctaacctggccgctaccaagatgtctgagtgcgtcctgggccagagcaagagggtggacttctgcggcaagggataccacctgatgtctttccctcagtcagctccccacggagtcgtgttcctgcacgtcacctacgtgccagcccaggagaagaacttcaccactgcccctgctatctgccacgacggcaaggctcacttcccccgtgaaggagtcttcgtgtccaacggcacccactggttcgtcactcagaggaacttctacgagccacagatcatcaccactgacaacactttcgtgagcggcaactgcgacgtggtcatcggtatcgtcaacaacaccgtgtacgaccccctgcagccagagctggactccttcaaggaagagctggacaagtacttcaagaaccacaccagcccagacgtcgacctgggcgacatctctggaatcaacgcttcagtcgtgaacatccagaaggagatcgaccgtctgaacgaagtggccaagaacctgaacgaatctctgatcgacctgcaggagctgggaaagtacgaacagtacatcaagtggccttggtacatctggctgggtttcatcgctggcctcatcgctatcgtgatggtgaccatcatgctgtgctgcatgacttcctgctgcagctgcctgaagggctgctgctcttgcggatcatgctgcaagttcgacgaggacgactcagaacccgtcctgaagggcgtgaagctgcactacacctaa

SEQ ID NO: 241 - DNA, 3813 bp, synthetic construct
  source 1..3813: mol_type = other DNA
atgttcgtcttcctggtgctgctgcctctggtctccagccagtgcgtgaacctgatcaccaggactcagtcctacaccaacagcttcactagaggtgtgtactaccctgacaaggtcttccgctcttcagtgctgcactctactcaggacctgttcctgcccttcttctcaaacgtcacctggttccacgccatccacgtgtccggcaccaacggcactaagagattcgacaacccagtgctgcctttcaacgacggcgtctacttcgcttctaccgagaagtcaaacatcatccgcggatggatcttcggcaccactctggactccaagactcagagcctgctgatcgtcaacaacgccaccaacgtggtcatcaaggtgtgcgaattccagttctgcaacgacccattcctggacgtgtactaccacgagaacaacaagtctcgcatggagtcagaattgagagtctactccagcgctaacaactgcactttcgagtacgtgtctcagcctttcctgatggacctggaaggaaagcagggtaacttcaagaacctgcgtgagttcgtcttcaagaacatcgacggttacttcaagatttactctaagcacaccccagtgaacctgggtagggacctgcctcagggcttctcagctctggagccactggtggacctgcctatcggcatcaacatcaccaggttccagactctgctggctctgcacagaagctacctgactccaggagactcatcttctagctggactgctggagctgctgcttactacgtgggttacctgcagcctcgcaccttcctgctgaagtacaacgaaaacggcaccatcactgacgccgtcgactgcgctctggaccctctgtctgaaaccaagtgcactctgaagtcattcaccgtggagaagggcatctaccagacttccaacttccgcgtgcagcccaccgaaagcatcgtccgtttccctaacatcactaacctgtgccccttccacgaggtcttcaacgccaccaccttcgcttctgtgtacgcctggaaccgcacccgtatctctaactgcgtcgccgactactcagtgctgtacaacttcgctcccttcttcgccttcaagtgctacggagtgtcaccaactaagctgaacgacctgtgcttcaccaacgtctacgctgactctttcgtgatcaggggtaacgaggtctcacagatcgctccaggccagactggaaacatcgccgactacaactacaagctgcctgacgacttcaccggttgcgtcatcgcttggaactccaacaagctggacagcaaagtgagcggcaactacaactacttgtacaggctgttcagaaagtccaaactgaagcccttcgagcgtgacatcagcactgaaatctaccaggctggtaacaagccatgcaacggtgtcgccggctttaactgctactctcccctgcagtcctacggcttccgtccaacctacggtgtgggccaccagccttacagggtggtcgtgctgtccttcgaactcctccacgctccagctactgtgtgcggaccaaagaagagcaccaacctggtcaagaacaagtgcgtgaacttcaacttcaacggtctgaccggaactggtgtcctgaccgagtctaacaagaagttcctgcccttccagcagttcggtcgtgacatcgctgacactaccgacgccgtgagggacccccagaccctggaaatcctggacatcactccatgctctttcggaggtgtctcagtgatcactccaggaaccaacacttcaaaccaggtcgctgtgctgtaccagggtgtcaactgcaccgaagtccctgtggccatccacgctgaccagctgacccccacttggagagtgtacagcaccggctctaacgtcttccagactcgcgctggttgcctgatcggcgccgagtacgtgaacaactcttacgaatgcgacatccccatcggcgctggaatctgcgcctcataccagacccagactaagtcccaccagcaggctcagagcgtcgcctcacagtccatcatcgcttacaccatgtctctgggcgctgaaaactcagtggcctactcaaacaactccatcgccatccctaccaacttcactatctccgtgaccactgagatcctgcccgtctccatgaccaagactagcgtggactgcactatgtacatctgcggagactccaccgaatgcagcaacctgctgctgcagtacggtagcttctgcacccagctgaagcgtgctctgactggcatcgccgtggagcaggacaagaacactcaggaagtcttcgctcaggtgaagcaaatctacaagacccctcccatcaagtacttcggcggattcaacttctcccagatcctgcctgaccccagcaagccatctaagagatcattcatcgaggacctgctgttcaacaaggtcactctggccgacgctggtttcatcaagcagtacggagactgcctgggtgacatcgccgctcgcgacctgatctgcgctcagaagttcaacggcctgaccgtgctgccacctctgctgactgacgaaatgatcgcccagtacacttccgccctgctggctggaaccatcacttctggttggaccttcggtgctggtgctgctctgcagatccctttcgctatgcagatggcctacaggttcaacggaatcggtgtcacccagaacgtgctgtacgagaaccagaagctgatcgctaaccagttcaactccgccatcggcaagatccaggactccctgagctctactgccagcgctctgggaaagctgcaggacgtcgtgaaccacaacgcccaggctctgaacaccctggtcaagcagctgtcatccaagttcggagctatcagctctgtgctgaacgacatcctctcccgcctggaccctcctgaggctgaagtccagatcgacaggctgatcactggtagactgcagtctctgcagacctacgtgactcagcagctgatccgcgccgctgaaatccgtgcctcagctaacctggccgctaccaagatgtctgagtgcgtcctgggccagagcaagagggtggacttctgcggcaagggataccacctgatgtctttccctcagtcagctccccacggagtcgtgttcctgcacgtcacctacgtgccagcccaggagaagaacttcaccactgcccctgctatctgccacgacggcaaggctcacttcccccgtgaaggagtcttcgtgtccaacggcacccactggttcgtcactcagaggaacttctacgagccacagatcatcaccactgacaacactttcgtgagcggcaactgcgacgtggtcatcggtatcgtcaacaacaccgtgtacgaccccctgcagccagagctggactccttcaaggaagagctggacaagtacttcaagaaccacaccagcccagacgtcgacctgggcgacatctctggaatcaacgcttcagtcgtgaacatccagaaggagatcgaccgtctgaacgaagtggccaagaacctgaacgaatctctgatcgacctgcaggagctgggaaagtacgaacagtacatcaagtggccttggtacatctggctgggtttcatcgctggcctcatcgctatcgtgatggtgaccatcatgctgtgctgcatgacttcctgctgcagctgcctgaagggctgctgctcttgcggatcatgctgcaagttcgacgaggacgactcagaacccgtcctgaagggcgtgaagctgcactacacctaa

SEQ ID NO: 242 - protein, 1270 aa, synthetic construct; identical to SEQ ID NO: 160

SEQ ID NO: 243 - protein, 1270 aa, synthetic construct; identical to SEQ ID NO: 160

SEQ ID NO: 244 - protein, 1270 aa, synthetic construct; identical to SEQ ID NO: 205

SEQ ID NO: 245 - protein, 1269 aa, synthetic construct
MFVFLVLLPLVSSQCVNLITRTQSYTNSFTRGVYYPDKVFRSSVLHSTQDLFLPFFSNVTWFHAIHVSGTNGTKRFDNPALPFNDGVYFASTEKSNIIRGWIFGTTLDSKTQSLLIVNNATNVVIKVCEFQFCNDPFLDVYQKNNKSWMESEFRVYSSANNCTFEYVSQPFLMDLVGKEGNFKNLREFVFKNIDGYFKIYSKHTPINLERDLPQGFSALEPLVDLPIGINITRFQTLLALHRSYLTPVDSSSGWTAGAAAYYVGYLQPRTFLLKYNENGTITDAVDCALDPLSETKCTLKSFTVEKGIYQTSNFRVQPTESIVRFPNITNLCPFHEVFNATTFASVYAWNRKRISNCVADYSVIYNFAPFFAFKCYGVSPTKLNDLCFTNVYADSFVIRGNEVSQIAPGQTGNIADYNYKLPDDFTGCVIAWNSNKLDSKPSGNYNYLYRLFRKSKLKPFERDISTEIYQAGNRPCNGVAGPNCYSPLQSYGFRPTYGVGHQPYRVVVLSFELLHAPATVCGPKKSTNLVKNKCVNFNFNGLTGTGVLTESNKKFLPFQQFGRDIADTTDAVRDPQTLEILDITPCSFGGVSVITPGTNTSNQVAVLYQGVNCTEVPVAIHADQLTPTWRVYSTGSNVFQTRAGCLIGAEYVNNSYECDIPIGAGICASYQTQTKSHRRARSVASQSIIAYTMSLGAENSVAYSNNSIAIPTNFTISVTTEILPVSMTKTSVDCTMYICGDSTECSNLLLQYGSFCTQLKRALTGIAVEQDKNTQEVFAQVKQIYKTPPIKYFGGFNFSQILPDPSKPSKRSFIEDLLFNKVTLADAGFIKQYGDCLGDIAARDLICAQKFNGLTVLPPLLTDEMIAQYTSALLAGTITSGWTFGAGAALQIPFAMQMAYRFNGIGVTQNVLYENQKLIANQFNSAIGKIQDSLSSTASALGKLQDVVNHNAQALNTLVKQLSSKFGAISSVLNDILSRLDKVEAEVQIDRLITGRLQSLQTYVTQQLIRAAEIRASANLAATKMSECVLGQSKRVDFCGKGYHLMSFPQSAPHGVVFLHVTYVPAQEKNFTTAPAICHDGKAHFPREGVFVSNGTHWFVTQRNFYEPQIITTDNTFVSGNCDVVIGIVNNTVYDPLQPELDSFKEELDKYFKNHTSPDVDLGDISGINASVVNIQKEIDRLNEVAKNLNESLIDLQELGKYEQYIKWPWYIWLGFIAGLIAIVMVTIMLCCMTSCCSCLKGCCSCGSCCKFDEDDSEPVLKGVKLHYT

SEQ ID NO: 246 - protein, 1269 aa, synthetic construct
MFVFLVLLPLVSSQCVNLITRTQSYTNSFTRGVYYPDKVFRSSVLHSTQDLFLPFFSNVTWFHAIHVSGTNGTKRFDNPALPFNDGVYFASTEKSNIIRGWIFGTTLDSKTQSLLIVNNATNVVIKVCEFQFCNDPFLDVYQKNNKSWMESEFRVYSSANNCTFEYVSQPFLMDLVGKEGNFKNLREFVFKNIDGYFKIYSKHTPINLERDLPQGFSALEPLVDLPIGINITRFQTLLALHRSYLTPVDSSSGWTAGAAAYYVGYLQPRTFLLKYNENGTITDAVDCALDPLSETKCTLKSFTVEKGIYQTSNFRVQPTESIVRFPNITNLCPFHEVFNATTFASVYAWNRKRISNCVADYSVIYNFAPFFAFKCYGVSPTKLNDLCFTNVYADSFVIRGNEVSQIAPGQTGNIADYNYKLPDDFTGCVIAWNSNKLDSKPSGNYNYLYRLFRKSKLKPFERDISTEIYQAGNRPCNGVAGPNCYSPLQSYGFRPTYGVGHQPYRVVVLSFELLHASATVCGPKKSTNLVKNKCVNFNFNGLTGTGVLTESNKKFLPFQQFGRDIADTTDAVRDPQTLEILDITPCSFGGVSVITPGTNTSNQVAVLYQGVNCTEVPVAIHADQLTPTWRVYSTGSNVFQTRAGCLIGAEYVNNSYECDIPIGAGICASYQTQTKSHRRARSVASQSIIAYTMSLGAENSVAYSNNSIAIPTNFTISVTTEILPVSMTKTSVDCTMYICGDSTECSNLLLQYGSFCTQLKRALTGIAVEQDKNTQEVFAQVKQIYKTPPIKYFGGFNFSQILPDPSKPSKRSFIEDLLFNKVTLADAGFIKQYGDCLGDIAARDLICAQKFNGLTVLPPLLTDEMIAQYTSALLAGTITSGWTFGAGAALQIPFAMQMAYRFNGIGVTQNVLYENQKLIANQFNSAIGKIQDSLSSTASALGKLQDVVNHNAQALNTLVKQLSSKFGAISSVLNDILSRLDKVEAEVQIDRLITGRLQSLQTYVTQQLIRAAEIRASANLAATKMSECVLGQSKRVDFCGKGYHLMSFPQSAPHGVVFLHVTYVPAQEKNFTTAPAICHDGKAHFPREGVFVSNGTHWFVTQRNFYEPQIITTDNTFVSGNCDVVIGIVNNTVYDPLQPELDSFKEELDKYFKNHTSPDVDLGDISGINASVVNIQKEIDRLNEVAKNLNESLIDLQELGKYEQYIKWPWYIWLGFIAGLIAIVMVTIMLCCMTSCCSCLKGCCSCGSCCKFDEDDSEPVLKGVKLHYT

SEQ ID NO: 247 - protein, 1269 aa, synthetic construct
MFVFLVLLPLVSSQCVNLITRTQSYTNSFTRGVYYPDKVFRSSVLHSTQDLFLPFFSNVTWFHAIHVSGTNGTKRFDNPALPFNDGVYFASTEKSNIIRGWIFGTTLDSKTQSLLIVNNATNVVIKVCEFQFCNDPFLDVYQKNNKSWMESEFRVYSSANNCTFEYVSQPFLMDLVGKEGNFKNLREFVFKNIDGYFKIYSKHTPINLERDLPQGFSALEPLVDLPIGINITRFQTLLALHRSYLTPVDSSSGWTAGAAAYYVGYLQPRTFLLKYNENGTITDAVDCALDPLSETKCTLKSFTVEKGIYQTSNFRVQPTESIVRFPNITNLCPFHEVFNATTFASVYAWNRKRISNCVADYSVIYNFAPFFAFKCYGVSPTKLNDLCFTNVYADSFVIRGNEVSQIAPGQTGNIADYNYKLPDDFTGCVIAWNSNKLDSTPSGNYNYLYRLFRKSKLKPFERDISTEIYQAGNRPCNGVAGPNCYSPLQSYGFRPTYGVGHQPYRVVVLSFELLHAPATVCGPKKSTNLVKNKCVNFNFNGLTGTGVLTESNKKFLPFQQFGRDIADTTDAVRDPQTLEILDITPCSFGGVSVITPGTNTSNQVAVLYQGVNCTEVPVAIHADQLTPTWRVYSTGSNVFQTRAGCLIGAEYVNNSYECDIPIGAGICASYQTQTKSHRRARSVASQSIIAYTMSLGAENSVAYSNNSIAIPTNFTISVTTEILPVSMTKTSVDCTMYICGDSTECSNLLLQYGSFCTQLKRALTGIAVEQDKNTQEVFAQVKQIYKTPPIKYFGGFNFSQILPDPSKPSKRSFIEDLLFNKVTLADAGFIKQYGDCLGDIAARDLICAQKFNGLTVLPPLLTDEMIAQYTSALLAGTITSGWTFGAGAALQIPFAMQMAYRFNGIGVTQNVLYENQKLIANQFNSAIGKIQDSLSSTASALGKLQDVVNHNAQALNTLVKQLSSKFGAISSVLNDILSRLDKVEAEVQIDRLITGRLQSLQTYVTQQLIRAAEIRASANLAATKMSECVLGQSKRVDFCGKGYHLMSFPQSAPHGVVFLHVTYVPAQEKNFTTAPAICHDGKAHFPREGVFVSNGTHWFVTQRNFYEPQIITTDNTFVSGNCDVVIGIVNNTVYDPLQPELDSFKEELDKYFKNHTSPDVDLGDISGINASVVNIQKEIDRLNEVAKNLNESLIDLQELGKYEQYIKWPWYIWLGFIAGLIAIVMVTIMLCCMTSCCSCLKGCCSCGSCCKFDEDDSEPVLKGVKLHYT

SEQ ID NO: 248 - protein, 1269 aa, synthetic construct
MFVFLVLLPLVSSQCVNLITRTQSYTNSFTRGVYYPDKVFRSSVLHSTQDLFLPFFSNVTWFHAIHVSGTNGTKRFDNPALPFNDGVYFASTEKSNIIRGWIFGTTLDSKTQSLLIVNNATNVVIKVCEFQFCNDPFLDVYQKNNKSWMESEFRVYSSANNCTFEYVSQPFLMDLVGKEGNFKNLREFVFKNIDGYFKIYSKHTPINLERDLPQGFSALEPLVDLPIGINITRFQTLLALHRSYLTPVDSSSGWTAGAAAYYVGYLQPRTFLLKYNENGTITDAVDCALDPLSETKCTLKSFTVEKGIYQTSNFRVQPTESIVRFPNITNLCPFHEVFNATTFASVYAWNRKRISNCVADYSVIYNFAPFFAFKCYGVSPTKLNDLCFTNVYADSFVIRGNEVSQIAPGQTGNIADYNYKLPDDFTGCVIAWNSNKLDSKPSGNYNYLYRLFRKSKLKPFERDISTEIYQAGNRPCNGVAGSNCYSPLQSYGFRPTYGVGHQPYRVVVLSFELLHAPATVCGPKKSTNLVKNKCVNFNFNGLTGTGVLTESNKKFLPFQQFGRDIADTTDAVRDPQTLEILDITPCSFGGVSVITPGTNTSNQVAVLYQGVNCTEVPVAIHADQLTPTWRVYSTGSNVFQTRAGCLIGAEYVNNSYECDIPIGAGICASYQTQTKSHRRARSVASQSIIAYTMSLGAENSVAYSNNSIAIPTNFTISVTTEILPVSMTKTSVDCTMYICGDSTECSNLLLQYGSFCTQLKRALTGIAVEQDKNTQEVFAQVKQIYKTPPIKYFGGFNFSQILPDPSKPSKRSFIEDLLFNKVTLADAGFIKQYGDCLGDIAARDLICAQKFNGLTVLPPLLTDEMIAQYTSALLAGTITSGWTFGAGAALQIPFAMQMAYRFNGIGVTQNVLYENQKLIANQFNSAIGKIQDSLSSTASALGKLQDVVNHNAQALNTLVKQLSSKFGAISSVLNDILSRLDKVEAEVQIDRLITGRLQSLQTYVTQQLIRAAEIRASANLAATKMSECVLGQSKRVDFCGKGYHLMSFPQSAPHGVVFLHVTYVPAQEKNFTTAPAICHDGKAHFPREGVFVSNGTHWFVTQRNFYEPQIITTDNTFVSGNCDVVIGIVNNTVYDPLQPELDSFKEELDKYFKNHTSPDVDLGDISGINASVVNIQKEIDRLNEVAKNLNESLIDLQELGKYEQYIKWPWYIWLGFIAGLIAIVMVTIMLCCMTSCCSCLKGCCSCGSCCKFDEDDSEPVLKGVKLHYT

SEQ ID NO: 249 - protein, 1269 aa, synthetic construct
MFVFLVLLPLVSSQCVNLITRTQSYTNSFTRGVYYPDKVFRSSVLHSTQDLFLPFFSNVTWFHAIHVSGTNGTKRFDNPALPFNDGVYFASTEKSNIIRGWIFGTTLDSKTQSLLIVNNATNVVIKVCEFQFCNDPFLDVYQKNNKSWMESEFRVYSSANNCTFEYVSQPFLMDLVGKEGNFKNLREFVFKNIDGYFKIYSKHTPINLERDLPQGFSALEPLVDLPIGINITRFQTLLALHRSYLTPVDSSSGWTAGAAAYYVGYLQPRTFLLKYNENGTITDAVDCALDPLSETKCTLKSFTVEKGIYQTSNFRVQPTESIVRFPNITNLCPFHEVFNATTFASVYAWNRKRISNCVADYSVIYNFAPFFAFKCYGVSPTKLNDLCFTNVYADSFVIRGNEVSQIAPGQTGNIADYNYKLPDDFTGCVIAWNSNKLDSKPSGNYNYLYRLFRKSKLKPFERDISTEIYQAGNKPCNGVAGPNCYSPLQSYGFRPTYGVGHQPYRVVVLSFELLHAPATVCGPKKSTNLVKNKCVNFNFNGLTGTGVLTESNKKFLPFQQFGRDIADTTDAVRDPQTLEILDITPCSFGGVSVITPGTNTSNQVAVLYQGVNCTEVPVAIHADQLTPTWRVYSTGSNVFQTRAGCLIGAEYVNNSYECDIPIGAGICASYQTQTKSHRRARSVASQSIIAYTMSLGAENSVAYSNNSIAIPTNFTISVTTEILPVSMTKTSVDCTMYICGDSTECSNLLLQYGSFCTQLKRALTGIAVEQDKNTQEVFAQVKQIYKTPPIKYFGGFNFSQILPDPSKPSKRSFIEDLLFNKVTLADAGFIKQYGDCLGDIAARDLICAQKFNGLTVLPPLLTDEMIAQYTSALLAGTITSGWTFGAGAALQIPFAMQMAYRFNGIGVTQNVLYENQKLIANQFNSAIGKIQDSLSSTASALGKLQDVVNHNAQALNTLVKQLSSKFGAISSVLNDILSRLDKVEAEVQIDRLITGRLQSLQTYVTQQLIRAAEIRASANLAATKMSECVLGQSKRVDFCGKGYHLMSFPQSAPHGVVFLHVTYVPAQEKNFTTAPAICHDGKAHFPREGVFVSNGTHWFVTQRNFYEPQIITTDNTFVSGNCDVVIGIVNNTVYDPLQPELDSFKEELDKYFKNHTSPDVDLGDISGINASVVNIQKEIDRLNEVAKNLNESLIDLQELGKYEQYIKWPWYIWLGFIAGLIAIVMVTIMLCCMTSCCSCLKGCCSCGSCCKFDEDDSEPVLKGVKLHYT

SEQ ID NO: 250 - protein, 1269 aa, synthetic construct
MFVFLVLLPLVSSQCVNLITRTQSYTNSFTRGVYYPDKVFRSSVLHSTQDLFLPFFSNVTWFHAIHVSGTNGTKRFDNPALPFNDGVYFASTEKSNIIRGWIFGTTLDSKTQSLLIVNNATNVVIKVCEFQFCNDPFLDVYQKNNKSWMESEFRVYSSANNCTFEYVSQPFLMDLVGKEGNFKNLREFVFKNIDGYFKIYSKHTPINLERDLPQGFSALEPLVDLPIGINITRFQTLLALHRSYLTPVDSSSGWTAGAAAYYVGYLQPRTFLLKYNENGTITDAVDCALDPLSETKCTLKSFTVEKGIYQTSNFRVQPTESIVRFPNITNLCPFHEVFNATTFASVYAWNRKRISNCVADYSVIYNFAPFFAFKCYGVSPTKLNDLCFTNVYADSFVIRGNEVSQIAPGQTGNIADYNYKLPDDFTGCVIAWNSNKLDSKPSGNYNYLYRLFRKSKLKPFERDISTEIYQAGNRPCNGVAGPNCYSPLQSYGFRPTYGVGHQPYRVVVLSFELLHAPATVCGPKKSTNLVKNKCVNFNFNGLTGTGVLTESNKKFLPFQQFGRDIADTTDAVRDPQTLEILDITPCSFGGVSVITPGTNTSNQVAVLYQGVNCTEVPVAIHADQLTPTWRVYSTGSNVFQTRAGCLIGAEYVNNSYECDIPIGAGICASYQTQTKSHQQAQSVASQSIIAYTMSLGAENSVAYSNNSIAIPTNFTISVTTEILPVSMTKTSVDCTMYICGDSTECSNLLLQYGSFCTQLKRALTGIAVEQDKNTQEVFAQVKQIYKTPPIKYFGGFNFSQILPDPSKPSKRSFIEDLLFNKVTLADAGFIKQYGDCLGDIAARDLICAQKFNGLTVLPPLLTDEMIAQYTSALLAGTITSGWTFGAGAALQIPFAMQMAYRFNGIGVTQNVLYENQKLIANQFNSAIGKIQDSLSSTASALGKLQDVVNHNAQALNTLVKQLSSKFGAISSVLNDILSRLDPPEAEVQIDRLITGRLQSLQTYVTQQLIRAAEIRASANLAATKMSECVLGQSKRVDFCGKGYHLMSFPQSAPHGVVFLHVTYVPAQEKNFTTAPAICHDGKAHFPREGVFVSNGTHWFVTQRNFYEPQIITTDNTFVSGNCDVVIGIVNNTVYDPLQPELDSFKEELDKYFKNHTSPDVDLGDISGINASVVNIQKEIDRLNEVAKNLNESLIDLQELGKYEQYIKWPWYIWLGFIAGLIAIVMVTIMLCCMTSCCSCLKGCCSCGSCCKFDEDDSEPVLKGVKLHYT

SEQ ID NO: 251 - protein, 1269 aa, synthetic construct
MFVFLVLLPLVSSQCVNLITRTQSYTNSFTRGVYYPDKVFRSSVLHSTQDLFLPFFSNVTWFHAIHVSGTNGTKRFDNPALPFNDGVYFASTEKSNIIRGWIFGTTLDSKTQSLLIVNNATNVVIKVCEFQFCNDPFLDVYQKNNKSWMESEFRVYSSANNCTFEYVSQPFLMDLVGKEGNFKNLREFVFKNIDGYFKIYSKHTPINLERDLPQGFSALEPLVDLPIGINITRFQTLLALHRSYLTPVDSSSGWTAGAAAYYVGYLQPRTFLLKYNENGTITDAVDCALDPLSETKCTLKSFTVEKGIYQTSNFRVQPTESIVRFPNITNLCPFHEVFNATTFASVYAWNRKRISNCVADYSVIYNFAPFFAFKCYGVSPTKLNDLCFTNVYADSFVIRGNEVSQIAPGQTGNIADYNYKLPDDFTGCVIAWNSNKLDSKPSGNYNYLYRLFRKSKLKPFERDISTEIYQAGNRPCNGVAGPNCYSPLQSYGFRPTYGVGHQPYRVVVLSFELLHASATVCGPKKSTNLVKNKCVNFNFNGLTGTGVLTESNKKFLPFQQFGRDIADTTDAVRDPQTLEILDITPCSFGGVSVITPGTNTSNQVAVLYQGVNCTEVPVAIHADQLTPTWRVYSTGSNVFQTRAGCLIGAEYVNNSYECDIPIGAGICASYQTQTKSHQQAQSVASQSIIAYTMSLGAENSVAYSNNSIAIPTNFTISVTTEILPVSMTKTSVDCTMYICGDSTECSNLLLQYGSFCTQLKRALTGIAVEQDKNTQEVFAQVKQIYKTPPIKYFGGFNFSQILPDPSKPSKRSFIEDLLFNKVTLADAGFIKQYGDCLGDIAARDLICAQKFNGLTVLPPLLTDEMIAQYTSALLAGTITSGWTFGAGAALQIPFAMQMAYRFNGIGVTQNVLYENQKLIANQFNSAIGKIQDSLSSTASALGKLQDVVNHNAQALNTLVKQLSSKFGAISSVLNDILSRLDPPEAEVQIDRLITGRLQSLQTYVTQQLIRAAEIRASANLAATKMSECVLGQSKRVDFCGKGYHLMSFPQSAPHGVVFLHVTYVPAQEKNFTTAPAICHDGKAHFPREGVFVSNGTHWFVTQRNFYEPQIITTDNTFVSGNCDVVIGIVNNTVYDPLQPELDSFKEELDKYFKNHTSPDVDLGDISGINASVVNIQKEIDRLNEVAKNLNESLIDLQELGKYEQYIKWPWYIWLGFIAGLIAIVMVTIMLCCMTSCCSCLKGCCSCGSCCKFDEDDSEPVLKGVKLHYT

SEQ ID NO: 252 - protein, 1269 aa, synthetic construct
MFVFLVLLPLVSSQCVNLITRTQSYTNSFTRGVYYPDKVFRSSVLHSTQDLFLPFFSNVTWFHAIHVSGTNGTKRFDNPALPFNDGVYFASTEKSNIIRGWIFGTTLDSKTQSLLIVNNATNVVIKVCEFQFCNDPFLDVYQKNNKSWMESEFRVYSSANNCTFEYVSQPFLMDLVGKEGNFKNLREFVFKNIDGYFKIYSKHTPINLERDLPQGFSALEPLVDLPIGINITRFQTLLALHRSYLTPVDSSSGWTAGAAAYYVGYLQPRTFLLKYNENGTITDAVDCALDPLSETKCTLKSFTVEKGIYQTSNFRVQPTESIVRFPNITNLCPFHEVFNATTFASVYAWNRKRISNCVADYSVIYNFAPFFAFKCYGVSPTKLNDLCFTNVYADSFVIRGNEVSQIAPGQTGNIADYNYKLPDDFTGCVIAWNSNKLDSTPSGNYNYLYRLFRKSKLKPFERDISTEIYQAGNRPCNGVAGPNCYSPLQSYGFRPTYGVGHQPYRVVVLSFELLHAPATVCGPKKSTNLVKNKCVNFNFNGLTGTGVLTESNKKFLPFQQFGRDIADTTDAVRDPQTLEILDITPCSFGGVSVITPGTNTSNQVAVLYQGVNCTEVPVAIHADQLTPTWRVYSTGSNVFQTRAGCLIGAEYVNNSYECDIPIGAGICASYQTQTKSHQQAQSVASQSIIAYTMSLGAENSVAYSNNSIAIPTNFTISVTTEILPVSMTKTSVDCTMYICGDSTECSNLLLQYGSFCTQLKRALTGIAVEQDKNTQEVFAQVKQIYKTPPIKYFGGFNFSQILPDPSKPSKRSFIEDLLFNKVTLADAGFIKQYGDCLGDIAARDLICAQKFNGLTVLPPLLTDEMIAQYTSALLAGTITSGWTFGAGAALQIPFAMQMAYRFNGIGVTQNVLYENQKLIANQFNSAIGKIQDSLSSTASALGKLQDVVNHNAQALNTLVKQLSSKFGAISSVLNDILSRLDPPEAEVQIDRLITGRLQSLQTYVTQQLIRAAEIRASANLAATKMSECVLGQSKRVDFCGKGYHLMSFPQSAPHGVVFLHVTYVPAQEKNFTTAPAICHDGKAHFPREGVFVSNGTHWFVTQRNFYEPQIITTDNTFVSGNCDVVIGIVNNTVYDPLQPELDSFKEELDKYFKNHTSPDVDLGDISGINASVVNIQKEIDRLNEVAKNLNESLIDLQELGKYEQYIKWPWYIWLGFIAGLIAIVMVTIMLCCMTSCCSCLKGCCSCGSCCKFDEDDSEPVLKGVKLHYT

SEQ ID NO: 253 - protein, 1269 aa, synthetic construct
MFVFLVLLPLVSSQCVNLITRTQSYTNSFTRGVYYPDKVFRSSVLHSTQDLFLPFFSNVTWFHAIHVSGTNGTKRFDNPALPFNDGVYFASTEKSNIIRGWIFGTTLDSKTQSLLIVNNATNVVIKVCEFQFCNDPFLDVYQKNNKSWMESEFRVYSSANNCTFEYVSQPFLMDLVGKEGNFKNLREFVFKNIDGYFKIYSKHTPINLERDLPQGFSALEPLVDLPIGINITRFQTLLALHRSYLTPVDSSSGWTAGAAAYYVGYLQPRTFLLKYNENGTITDAVDCALDPLSETKCTLKSFTVEKGIYQTSNFRVQPTESIVRFPNITNLCPFHEVFNATTFASVYAWNRKRISNCVADYSVIYNFAPFFAFKCYGVSPTKLNDLCFTNVYADSFVIRGNEVSQIAPGQTGNIADYNYKLPDDFTGCVIAWNSNKLDSKPSGNYNYLYRLFRKSKLKPFERDISTEIYQAGNRPCNGVAGSNCYSPLQSYGFRPTYGVGHQPYRVVVLSFELLHAPATVCGPKKSTNLVKNKCVNFNFNGLTGTGVLTESNKKFLPFQQFGRDIADTTDAVRDPQTLEILDITPCSFGGVSVITPGTNTSNQVAVLYQGVNCTEVPVAIHADQLTPTWRVYSTGSNVFQTRAGCLIGAEYVNNSYECDIPIGAGICASYQTQTKSHQQAQSVASQSIIAYTMSLGAENSVAYSNNSIAIPTNFTISVTTEILPVSMTKTSVDCTMYICGDSTECSNLLLQYGSFCTQLKRALTGIAVEQDKNTQEVFAQVKQIYKTPPIKYFGGFNFSQILPDPSKPSKRSFIEDLLFNKVTLADAGFIKQYGDCLGDIAARDLICAQKFNGLTVLPPLLTDEMIAQYTSALLAGTITSGWTFGAGAALQIPFAMQMAYRFNGIGVTQNVLYENQKLIANQFNSAIGKIQDSLSSTASALGKLQDVVNHNAQALNTLVKQLSSKFGAISSVLNDILSRLDPPEAEVQIDRLITGRLQSLQTYVTQQLIRAAEIRASANLAATKMSECVLGQSKRVDFCGKGYHLMSFPQSAPHGVVFLHVTYVPAQEKNFTTAPAICHDGKAHFPREGVFVSNGTHWFVTQRNFYEPQIITTDNTFVSGNCDVVIGIVNNTVYDPLQPELDSFKEELDKYFKNHTSPDVDLGDISGINASVVNIQKEIDRLNEVAKNLNESLIDLQELGKYEQYIKWPWYIWLGFIAGLIAIVMVTIMLCCMTSCCSCLKGCCSCGSCCKFDEDDSEPVLKGVKLHYT

SEQ ID NO: 254 - protein, 1269 aa, synthetic construct
MFVFLVLLPLVSSQCVNLITRTQSYTNSFTRGVYYPDKVFRSSVLHSTQDLFLPFFSNVTWFHAIHVSGTNGTKRFDNPALPFNDGVYFASTEKSNIIRGWIFGTTLDSKTQSLLIVNNATNVVIKVCEFQFCNDPFLDVYQKNNKSWMESEFRVYSSANNCTFEYVSQPFLMDLVGKEGNFKNLREFVFKNIDGYFKIYSKHTPINLERDLPQGFSALEPLVDLPIGINITRFQTLLALHRSYLTPVDSSSGWTAGAAAYYVGYLQPRTFLLKYNENGTITDAVDCALDPLSETKCTLKSFTVEKGIYQTSNFRVQPTESIVRFPNITNLCPFHEVFNATTFASVYAWNRKRISNCVADYSVIYNFAPFFAFKCYGVSPTKLNDLCFTNVYADSFVIRGNEVSQIAPGQTGNIADYNYKLPDDFTGCVIAWNSNKLDSKPSGNYNYLYRLFRKSKLKPFERDISTEIYQAGNKPCNGVAGPNCYSPLQSYGFRPTYGVGHQPYRVVVLSFELLHAPATVCGPKKSTNLVKNKCVNFNFNGLTGTGVLTESNKKFLPFQQFGRDIADTTDAVRDPQTLEILDITPCSFGGVSVITPGTNTSNQVAVLYQGVNCTEVPVAIHADQLTPTWRVYSTGSNVFQTRAGCLIGAEYVNNSYECDIPIGAGICASYQTQTKSHQQAQSVASQSIIAYTMSLGAENSVAYSNNSIAIPTNFTISVTTEILPVSMTKTSVDCTMYICGDSTECSNLLLQYGSFCTQLKRALTGIAVEQDKNTQEVFAQVKQIYKTPPIKYFGGFNFSQILPDPSKPSKRSFIEDLLFNKVTLADAGFIKQYGDCLGDIAARDLICAQKFNGLTVLPPLLTDEMIAQYTSALLAGTITSGWTFGAGAALQIPFAMQMAYRFNGIGVTQNVLYENQKLIANQFNSAIGKIQDSLSSTASALGKLQDVVNHNAQALNTLVKQLSSKFGAISSVLNDILSRLDPPEAEVQIDRLITGRLQSLQTYVTQQLIRAAEIRASANLAATKMSECVLGQSKRVDFCGKGYHLMSFPQSAPHGVVFLHVTYVPAQEKNFTTAPAICHDGKAHFPREGVFVSNGTHWFVTQRNFYEPQIITTDNTFVSGNCDVVIGIVNNTVYDPLQPELDSFKEELDKYFKNHTSPDVDLGDISGINASVVNIQKEIDRLNEVAKNLNESLIDLQELGKYEQYIKWPWYIWLGFIAGLIAIVMVTIMLCCMTSCCSCLKGCCSCGSCCKFDEDDSEPVLKGVKLHYT

SEQ ID NO: 255 - protein, 1256 aa, synthetic construct
QCVNLITRTQSYTNSFTRGVYYPDKVFRSSVLHSTQDLFLPFFSNVTWFHAIHVSGTNGTKRFDNPALPFNDGVYFASTEKSNIIRGWIFGTTLDSKTQSLLIVNNATNVVIKVCEFQFCNDPFLDVYQKNNKSWMESEFRVYSSANNCTFEYVSQPFLMDLVGKEGNFKNLREFVFKNIDGYFKIYSKHTPINLERDLPQGFSALEPLVDLPIGINITRFQTLLALHRSYLTPVDSSSGWTAGAAAYYVGYLQPRTFLLKYNENGTITDAVDCALDPLSETKCTLKSFTVEKGIYQTSNFRVQPTESIVRFPNITNLCPFHEVFNATTFASVYAWNRKRISNCVADYSVIYNFAPFFAFKCYGVSPTKLNDLCFTNVYADSFVIRGNEVSQIAPGQTGNIADYNYKLPDDFTGCVIAWNSNKLDSKPSGNYNYLYRLFRKSKLKPFERDISTEIYQAGNRPCNGVAGPNCYSPLQSYGFRPTYGVGHQPYRVVVLSFELLHAPATVCGPKKSTNLVKNKCVNFNFNGLTGTGVLTESNKKFLPFQQFGRDIADTTDAVRDPQTLEILDITPCSFGGVSVITPGTNTSNQVAVLYQGVNCTEVPVAIHADQLTPTWRVYSTGSNVFQTRAGCLIGAEYVNNSYECDIPIGAGICASYQTQTKSHRRARSVASQSIIAYTMSLGAENSVAYSNNSIAIPTNFTISVTTEILPVSMTKTSVDCTMYICGDSTECSNLLLQYGSFCTQLKRALTGIAVEQDKNTQEVFAQVKQIYKTPPIKYFGGFNFSQILPDPSKPSKRSFIEDLLFNKVTLADAGFIKQYGDCLGDIAARDLICAQKFNGLTVLPPLLTDEMIAQYTSALLAGTITSGWTFGAGAALQIPFAMQMAYRFNGIGVTQNVLYENQKLIANQFNSAIGKIQDSLSSTASALGKLQDVVNHNAQALNTLVKQLSSKFGAISSVLNDILSRLDKVEAEVQIDRLITGRLQSLQTYVTQQLIRAAEIRASANLAATKMSECVLGQSKRVDFCGKGYHLMSFPQSAPHGVVFLHVTYVPAQEKNFTTAPAICHDGKAHFPREGVFVSNGTHWFVTQRNFYEPQIITTDNTFVSGNCDVVIGIVNNTVYDPLQPELDSFKEELDKYFKNHTSPDVDLGDISGINASVVNIQKEIDRLNEVAKNLNESLIDLQELGKYEQYIKWPWYIWLGFIAGLIAIVMVTIMLCCMTSCCSCLKGCCSCGSCCKFDEDDSEPVLKGVKLHYT

SEQ ID NO: 256 - protein, 1256 aa, synthetic construct
QCVNLITRTQSYTNSFTRGVYYPDKVFRSSVLHSTQDLFLPFFSNVTWFHAIHVSGTNGTKRFDNPALPFNDGVYFASTEKSNIIRGWIFGTTLDSKTQSLLIVNNATNVVIKVCEFQFCNDPFLDVYQKNNKSWMESEFRVYSSANNCTFEYVSQPFLMDLVGKEGNFKNLREFVFKNIDGYFKIYSKHTPINLERDLPQGFSALEPLVDLPIGINITRFQTLLALHRSYLTPVDSSSGWTAGAAAYYVGYLQPRTFLLKYNENGTITDAVDCALDPLSETKCTLKSFTVEKGIYQTSNFRVQPTESIVRFPNITNLCPFHEVFNATTFASVYAWNRKRISNCVADYSVIYNFAPFFAFKCYGVSPTKLNDLCFTNVYADSFVIRGNEVSQIAPGQTGNIADYNYKLPDDFTGCVIAWNSNKLDSKPSGNYNYLYRLFRKSKLKPFERDISTEIYQAGNRPCNGVAGPNCYSPLQSYGFRPTYGVGHQPYRVVVLSFELLHASATVCGPKKSTNLVKNKCVNFNFNGLTGTGVLTESNKKFLPFQQFGRDIADTTDAVRDPQTLEILDITPCSFGGVSVITPGTNTSNQVAVLYQGVNCTEVPVAIHADQLTPTWRVYSTGSNVFQTRAGCLIGAEYVNNSYECDIPIGAGICASYQTQTKSHRRARSVASQSIIAYTMSLGAENSVAYSNNSIAIPTNFTISVTTEILPVSMTKTSVDCTMYICGDSTECSNLLLQYGSFCTQLKRALTGIAVEQDKNTQEVFAQVKQIYKTPPIKYFGGFNFSQILPDPSKPSKRSFIEDLLFNKVTLADAGFIKQYGDCLGDIAARDLICAQKFNGLTVLPPLLTDEMIAQYTSALLAGTITSGWTFGAGAALQIPFAMQMAYRFNGIGVTQNVLYENQKLIANQFNSAIGKIQDSLSSTASALGKLQDVVNHNAQALNTLVKQLSSKFGAISSVLNDILSRLDKVEAEVQIDRLITGRLQSLQTYVTQQLIRAAEIRASANLAATKMSECVLGQSKRVDFCGKGYHLMSFPQSAPHGVVFLHVTYVPAQEKNFTTAPAICHDGKAHFPREGVFVSNGTHWFVTQRNFYEPQIITTDNTFVSGNCDVVIGIVNNTVYDPLQPELDSFKEELDKYFKNHTSPDVDLGDISGINASVVNIQKEIDRLNEVAKNLNESLIDLQELGKYEQYIKWPWYIWLGFIAGLIAIVMVTIMLCCMTSCCSCLKGCCSCGSCCKFDEDDSEPVLKGVKLHYT

SEQ ID NO: 257 - protein, 1256 aa, synthetic construct
QCVNLITRTQSYTNSFTRGVYYPDKVFRSSVLHSTQDLFLPFFSNVTWFHAIHVSGTNGTKRFDNPALPFNDGVYFASTEKSNIIRGWIFGTTLDSKTQSLLIVNNATNVVIKVCEFQFCNDPFLDVYQKNNKSWMESEFRVYSSANNCTFEYVSQPFLMDLVGKEGNFKNLREFVFKNIDGYFKIYSKHTPINLERDLPQGFSALEPLVDLPIGINITRFQTLLALHRSYLTPVDSSSGWTAGAAAYYVGYLQPRTFLLKYNENGTITDAVDCALDPLSETKCTLKSFTVEKGIYQTSNFRVQPTESIVRFPNITNLCPFHEVFNATTFASVYAWNRKRISNCVADYSVIYNFAPFFAFKCYGVSPTKLNDLCFTNVYADSFVIRGNEVSQIAPGQTGNIADYNYKLPDDFTGCVIAWNSNKLDSTPSGNYNYLYRLFRKSKLKPFERDISTEIYQAGNRPCNGVAGPNCYSPLQSYGFRPTYGVGHQPYRVVVLSFELLHAPATVCGPKKSTNLVKNKCVNFNFNGLTGTGVLTESNKKFLPFQQFGRDIADTTDAVRDPQTLEILDITPCSFGGVSVITPGTNTSNQVAVLYQGVNCTEVPVAIHADQLTPTWRVYSTGSNVFQTRAGCLIGAEYVNNSYECDIPIGAGICASYQTQTKSHRRARSVASQSIIAYTMSLGAENSVAYSNNSIAIPTNFTISVTTEILPVSMTKTSVDCTMYICGDSTECSNLLLQYGSFCTQLKRALTGIAVEQDKNTQEVFAQVKQIYKTPPIKYFGGFNFSQILPDPSKPSKRSFIEDLLFNKVTLADAGFIKQYGDCLGDIAARDLICAQKFNGLTVLPPLLTDEMIAQYTSALLAGTITSGWTFGAGAALQIPFAMQMAYRFNGIGVTQNVLYENQKLIANQFNSAIGKIQDSLSSTASALGKLQDVVNHNAQALNTLVKQLSSKFGAISSVLNDILSRLDKVEAEVQIDRLITGRLQSLQTYVTQQLIRAAEIRASANLAATKMSECVLGQSKRVDFCGKGYHLMSFPQSAPHGVVFLHVTYVPAQEKNFTTAPAICHDGKAHFPREGVFVSNGTHWFVTQRNFYEPQIITTDNTFVSGNCDVVIGIVNNTVYDPLQPELDSFKEELDKYFKNHTSPDVDLGDISGINASVVNIQKEIDRLNEVAKNLNESLIDLQELGKYEQYIKWPWYIWLGFIAGLIAIVMVTIMLCCMTSCCSCLKGCCSCGSCCKFDEDDSEPVLKGVKLHYT

SEQ ID NO: 258 - protein, 1256 aa, synthetic construct
QCVNLITRTQSYTNSFTRGVYYPDKVFRSSVLHSTQDLFLPFFSNVTWFHAIHVSGTNGTKRFDNPALPFNDGVYFASTEKSNIIRGWIFGTTLDSKTQSLLIVNNATNVVIKVCEFQFCNDPFLDVYQKNNKSWMESEFRVYSSANNCTFEYVSQPFLMDLVGKEGNFKNLREFVFKNIDGYFKIYSKHTPINLERDLPQGFSALEPLVDLPIGINITRFQTLLALHRSYLTPVDSSSGWTAGAAAYYVGYLQPRTFLLKYNENGTITDAVDCALDPLSETKCTLKSFTVEKGIYQTSNFRVQPTESIVRFPNITNLCPFHEVFNATTFASVYAWNRKRISNCVADYSVIYNFAPFFAFKCYGVSPTKLNDLCFTNVYADSFVIRGNEVSQIAPGQTGNIADYNYKLPDDFTGCVIAWNSNKLDSKPSGNYNYLYRLFRKSKLKPFERDISTEIYQAGNRPCNGVAGSNCYSPLQSYGFRPTYGVGHQPYRVVVLSFELLHAPATVCGPKKSTNLVKNKCVNFNFNGLTGTGVLTESNKKFLPFQQFGRDIADTTDAVRDPQTLEILDITPCSFGGVSVITPGTNTSNQVAVLYQGVNCTEVPVAIHADQLTPTWRVYSTGSNVFQTRAGCLIGAEYVNNSYECDIPIGAGICASYQTQTKSHRRARSVASQSIIAYTMSLGAENSVAYSNNSIAIPTNFTISVTTEILPVSMTKTSVDCTMYICGDSTECSNLLLQYGSFCTQLKRALTGIAVEQDKNTQEVFAQVKQIYKTPPIKYFGGFNFSQILPDPSKPSKRSFIEDLLFNKVTLADAGFIKQYGDCLGDIAARDLICAQKFNGLTVLPPLLTDEMIAQYTSALLAGTITSGWTFGAGAALQIPFAMQMAYRFNGIGVTQNVLYENQKLIANQFNSAIGKIQDSLSSTASALGKLQDVVNHNAQALNTLVKQLSSKFGAISSVLNDILSRLDKVEAEVQIDRLITGRLQSLQTYVTQQLIRAAEIRASANLAATKMSECVLGQSKRVDFCGKGYHLMSFPQSAPHGVVFLHVTYVPAQEKNFTTAPAICHDGKAHFPREGVFVSNGTHWFVTQRNFYEPQIITTDNTFVSGNCDVVIGIVNNTVYDPLQPELDSFKEELDKYFKNHTSPDVDLGDISGINASVVNIQKEIDRLNEVAKNLNESLIDLQELGKYEQYIKWPWYIWLGFIAGLIAIVMVTIMLCCMTSCCSCLKGCCSCGSCCKFDEDDSEPVLKGVKLHYT

SEQ ID NO: 259 - protein, 1256 aa, synthetic construct
QCVNLITRTQSYTNSFTRGVYYPDKVFRSSVLHSTQDLFLPFFSNVTWFHAIHVSGTNGTKRFDNPALPFNDGVYFASTEKSNIIRGWIFGTTLDSKTQSLLIVNNATNVVIKVCEFQFCNDPFLDVYQKNNKSWMESEFRVYSSANNCTFEYVSQPFLMDLVGKEGNFKNLREFVFKNIDGYFKIYSKHTPINLERDLPQGFSALEPLVDLPIGINITRFQTLLALHRSYLTPVDSSSGWTAGAAAYYVGYLQPRTFLLKYNENGTITDAVDCALDPLSETKCTLKSFTVEKGIYQTSNFRVQPTESIVRFPNITNLCPFHEVFNATTFASVYAWNRKRISNCVADYSVIYNFAPFFAFKCYGVSPTKLNDLCFTNVYADSFVIRGNEVSQIAPGQTGNIADYNYKLPDDFTGCVIAWNSNKLDSKPSGNYNYLYRLFRKSKLKPFERDISTEIYQAGNKPCNGVAGPNCYSPLQSYGFRPTYGVGHQPYRVVVLSFELLHAPATVCGPKKSTNLVKNKCVNFNFNGLTGTGVLTESNKKFLPFQQFGRDIADTTDAVRDPQTLEILDITPCSFGGVSVITPGTNTSNQVAVLYQGVNCTEVPVAIHADQLTPTWRVYSTGSNVFQTRAGCLIGAEYVNNSYECDIPIGAGICASYQTQTKSHRRARSVASQSIIAYTMSLGAENSVAYSNNSIAIPTNFTISVTTEILPVSMTKTSVDCTMYICGDSTECSNLLLQYGSFCTQLKRALTGIAVEQDKNTQEVFAQVKQIYKTPPIKYFGGFNFSQILPDPSKPSKRSFIEDLLFNKVTLADAGFIKQYGDCLGDIAARDLICAQKFNGLTVLPPLLTDEMIAQYTSALLAGTITSGWTFGAGAALQIPFAMQMAYRFNGIGVTQNVLYENQKLIANQFNSAIGKIQDSLSSTASALGKLQDVVNHNAQALNTLVKQLSSKFGAISSVLNDILSRLDKVEAEVQIDRLITGRLQSLQTYVTQQLIRAAEIRASANLAATKMSECVLGQSKRVDFCGKGYHLMSFPQSAPHGVVFLHVTYVPAQEKNFTTAPAICHDGKAHFPREGVFVSNGTHWFVTQRNFYEPQIITTDNTFVSGNCDVVIGIVNNTVYDPLQPELDSFKEELDKYFKNHTSPDVDLGDISGINASVVNIQKEIDRLNEVAKNLNESLIDLQELGKYEQYIKWPWYIWLGFIAGLIAIVMVTIMLCCMTSCCSCLKGCCSCGSCCKFDEDDSEPVLKGVKLHYT

SEQ ID NO: 260 - protein, 1256 aa, synthetic construct
QCVNLITRTQSYTNSFTRGVYYPDKVFRSSVLHSTQDLFLPFFSNVTWFHAIHVSGTNGTKRFDNPALPFNDGVYFASTEKSNIIRGWIFGTTLDSKTQSLLIVNNATNVVIKVCEFQFCNDPFLDVYQKNNKSWMESEFRVYSSANNCTFEYVSQPFLMDLVGKEGNFKNLREFVFKNIDGYFKIYSKHTPINLERDLPQGFSALEPLVDLPIGINITRFQTLLALHRSYLTPVDSSSGWTAGAAAYYVGYLQPRTFLLKYNENGTITDAVDCALDPLSETKCTLKSFTVEKGIYQTSNFRVQPTESIVRFPNITNLCPFHEVFNATTFASVYAWNRKRISNCVADYSVIYNFAPFFAFKCYGVSPTKLNDLCFTNVYADSFVIRGNEVSQIAPGQTGNIADYNYKLPDDFTGCVIAWNSNKLDSKPSGNYNYLYRLFRKSKLKPFERDISTEIYQAGNRPCNGVAGPNCYSPLQSYGFRPTYGVGHQPYRVVVLSFELLHAPATVCGPKKSTNLVKNKCVNFNFNGLTGTGVLTESNKKFLPFQQFGRDIADTTDAVRDPQTLEILDITPCSFGGVSVITPGTNTSNQVAVLYQGVNCTEVPVAIHADQLTPTWRVYSTGSNVFQTRAGCLIGAEYVNNSYECDIPIGAGICASYQTQTKSHQQAQSVASQSIIAYTMSLGAENSVAYSNNSIAIPTNFTISVTTEILPVSMTKTSVDCTMYICGDSTECSNLLLQYGSFCTQLKRALTGIAVEQDKNTQEVFAQVKQIYKTPPIKYFGGFNFSQILPDPSKPSKRSFIEDLLFNKVTLADAGFIKQYGDCLGDIAARDLICAQKFNGLTVLPPLLTDEMIAQYTSALLAGTITSGWTFGAGAALQIPFAMQMAYRFNGIGVTQNVLYENQKLIANQFNSAIGKIQDSLSSTASALGKLQDVVNHNAQALNTLVKQLSSKFGAISSVLNDILSRLDPPEAEVQIDRLITGRLQSLQTYVTQQLIRAAEIRASANLAATKMSECVLGQSKRVDFCGKGYHLMSFPQSAPHGVVFLHVTYVPAQEKNFTTAPAICHDGKAHFPREGVFVSNGTHWFVTQRNFYEPQIITTDNTFVSGNCDVVIGIVNNTVYDPLQPELDSFKEELDKYFKNHTSPDVDLGDISGINASVVNIQKEIDRLNEVAKNLNESLIDLQELGKYEQYIKWPWYIWLGFIAGLIAIVMVTIMLCCMTSCCSCLKGCCSCGSCCKFDEDDSEPVLKGVKLHYT

SEQ ID NO: 261 - protein, 1256 aa, synthetic construct
QCVNLITRTQSYTNSFTRGVYYPDKVFRSSVLHSTQDLFLPFFSNVTWFHAIHVSGTNGTKRFDNPALPFNDGVYFASTEKSNIIRGWIFGTTLDSKTQSLLIVNNATNVVIKVCEFQFCNDPFLDVYQKNNKSWMESEFRVYSSANNCTFEYVSQPFLMDLVGKEGNFKNLREFVFKNIDGYFKIYSKHTPINLERDLPQGFSALEPLVDLPIGINITRFQTLLALHRSYLTPVDSSSGWTAGAAAYYVGYLQPRTFLLKYNENGTITDAVDCALDPLSETKCTLKSFTVEKGIYQTSNFRVQPTESIVRFPNITNLCPFHEVFNATTFASVYAWNRKRISNCVADYSVIYNFAPFFAFKCYGVSPTKLNDLCFTNVYADSFVIRGNEVSQIAPGQTGNIADYNYKLPDDFTGCVIAWNSNKLDSKPSGNYNYLYRLFRKSKLKPFERDISTEIYQAGNRPCNGVAGPNCYSPLQSYGFRPTYGVGHQPYRVVVLSFELLHASATVCGPKKSTNLVKNKCVNFNFNGLTGTGVLTESNKKFLPFQQFGRDIADTTDAVRDPQTLEILDITPCSFGGVSVITPGTNTSNQVAVLYQGVNCTEVPVAIHADQLTPTWRVYSTGSNVFQTRAGCLIGAEYVNNSYECDIPIGAGICASYQTQTKSHQQAQSVASQSIIAYTMSLGAENSVAYSNNSIAIPTNFTISVTTEILPVSMTKTSVDCTMYICGDSTECSNLLLQYGSFCTQLKRALTGIAVEQDKNTQEVFAQVKQIYKTPPIKYFGGFNFSQILPDPSKPSKRSFIEDLLFNKVTLADAGFIKQYGDCLGDIAARDLICAQKFNGLTVLPPLLTDEMIAQYTSALLAGTITSGWTFGAGAALQIPFAMQMAYRFNGIGVTQNVLYENQKLIANQFNSAIGKIQDSLSSTASALGKLQDVVNHNAQALNTLVKQLSSKFGAISSVLNDILSRLDPPEAEVQIDRLITGRLQSLQTYVTQQLIRAAEIRASANLAATKMSECVLGQSKRVDFCGKGYHLMSFPQSAPHGVVFLHVTYVPAQEKNFTTAPAICHDGKAHFPREGVFVSNGTHWFVTQRNFYEPQIITTDNTFVSGNCDVVIGIVNNTVYDPLQPELDSFKEELDKYFKNHTSPDVDLGDISGINASVVNIQKEIDRLNEVAKNLNESLIDLQELGKYEQYIKWPWYIWLGFIAGLIAIVMVTIMLCCMTSCCSCLKGCCSCGSCCKFDEDDSEPVLKGVKLHYT

SEQ ID NO: 262 - protein, 1256 aa, synthetic construct
QCVNLITRTQSYTNSFTRGVYYPDKVFRSSVLHSTQDLFLPFFSNVTWFHAIHVSGTNGTKRFDNPALPFNDGVYFASTEKSNIIRGWIFGTTLDSKTQSLLIVNNATNVVIKVCEFQFCNDPFLDVYQKNNKSWMESEFRVYSSANNCTFEYVSQPFLMDLVGKEGNFKNLREFVFKNIDGYFKIYSKHTPINLERDLPQGFSALEPLVDLPIGINITRFQTLLALHRSYLTPVDSSSGWTAGAAAYYVGYLQPRTFLLKYNENGTITDAVDCALDPLSETKCTLKSFTVEKGIYQTSNFRVQPTESIVRFPNITNLCPFHEVFNATTFASVYAWNRKRISNCVADYSVIYNFAPFFAFKCYGVSPTKLNDLCFTNVYADSFVIRGNEVSQIAPGQTGNIADYNYKLPDDFTGCVIAWNSNKLDSTPSGNYNYLYRLFRKSKLKPFERDISTEIYQAGNRPCNGVAGPNCYSPLQSYGFRPTYGVGHQPYRVVVLSFELLHAPATVCGPKKSTNLVKNKCVNFNFNGLTGTGVLTESNKKFLPFQQFGRDIADTTDAVRDPQTLEILDITPCSFGGVSVITPGTNTSNQVAVLYQGVNCTEVPVAIHADQLTPTWRVYSTGSNVFQTRAGCLIGAEYVNNSYECDIPIGAGICASYQTQTKSHQQAQSVASQSIIAYTMSLGAENSVAYSNNSIAIPTNFTISVTTEILPVSMTKTSVDCTMYICGDSTECSNLLLQYGSFCTQLKRALTGIAVEQDKNTQEVFAQVKQIYKTPPIKYFGGFNFSQILPDPSKPSKRSFIEDLLFNKVTLADAGFIKQYGDCLGDIAARDLICAQKFNGLTVLPPLLTDEMIAQYTSALLAGTITSGWTFGAGAALQIPFAMQMAYRFNGIGVTQNVLYENQKLIANQFNSAIGKIQDSLSSTASALGKLQDVVNHNAQALNTLVKQLSSKFGAISSVLNDILSRLDPPEAEVQIDRLITGRLQSLQTYVTQQLIRAAEIRASANLAATKMSECVLGQSKRVDFCGKGYHLMSFPQSAPHGVVFLHVTYVPAQEKNFTTAPAICHDGKAHFPREGVFVSNGTHWFVTQRNFYEPQIITTDNTFVSGNCDVVIGIVNNTVYDPLQPELDSFKEELDKYFKNHTSPDVDLGDISGINASVVNIQKEIDRLNEVAKNLNESLIDLQELGKYEQYIKWPWYIWLGFIAGLIAIVMVTIMLCCMTSCCSCLKGCCSCGSCCKFDEDDSEPVLKGVKLHYT

SEQ ID NO: 263 - protein, 1256 aa, synthetic construct
QCVNLITRTQSYTNSFTRGVYYPDKVFRSSVLHSTQDLFLPFFSNVTWFHAIHVSGTNGTKRFDNPALPFNDGVYFASTEKSNIIRGWIFGTTLDSKTQSLLIVNNATNVVIKVCEFQFCNDPFLDVYQKNNKSWMESEFRVYSSANNCTFEYVSQPFLMDLVGKEGNFKNLREFVFKNIDGYFKIYSKHTPINLERDLPQGFSALEPLVDLPIGINITRFQTLLALHRSYLTPVDSSSGWTAGAAAYYVGYLQPRTFLLKYNENGTITDAVDCALDPLSETKCTLKSFTVEKGIYQTSNFRVQPTESIVRFPNITNLCPFHEVFNATTFASVYAWNRKRISNCVADYSVIYNFAPFFAFKCYGVSPTKLNDLCFTNVYADSFVIRGNEVSQIAPGQTGNIADYNYKLPDDFTGCVIAWNSNKLDSKPSGNYNYLYRLFRKSKLKPFERDISTEIYQAGNRPCNGVAGSNCYSPLQSYGFRPTYGVGHQPYRVVVLSFELLHAPATVCGPKKSTNLVKNKCVNFNFNGLTGTGVLTESNKKFLPFQQFGRDIADTTDAVRDPQTLEILDITPCSFGGVSVITPGTNTSNQVAVLYQGVNCTEVPVAIHADQLTPTWRVYSTGSNVFQTRAGCLIGAEYVNNSYECDIPIGAGICASYQTQTKSHQQAQSVASQSIIAYTMSLGAENSVAYSNNSIAIPTNFTISVTTEILPVSMTKTSVDCTMYICGDSTECSNLLLQYGSFCTQLKRALTGIAVEQDKNTQEVFAQVKQIYKTPPIKYFGGFNFSQILPDPSKPSKRSFIEDLLFNKVTLADAGFIKQYGDCLGDIAARDLICAQKFNGLTVLPPLLTDEMIAQYTSALLAGTITSGWTFGAGAALQIPFAMQMAYRFNGIGVTQNVLYENQKLIANQFNSAIGKIQDSLSSTASALGKLQDVVNHNAQALNTLVKQLSSKFGAISSVLNDILSRLDPPEAEVQIDRLITGRLQSLQTYVTQQLIRAAEIRASANLAATKMSECVLGQSKRVDFCGKGYHLMSFPQSAPHGVVFLHVTYVPAQEKNFTTAPAICHDGKAHFPREGVFVSNGTHWFVTQRNFYEPQIITTDNTFVSGNCDVVIGIVNNTVYDPLQPELDSFKEELDKYFKNHTSPDVDLGDISGINASVVNIQKEIDRLNEVAKNLNESLIDLQELGKYEQYIKWPWYIWLGFIAGLIAIVMVTIMLCCMTSCCSCLKGCCSCGSCCKFDEDDSEPVLKGVKLHYT

SEQ ID NO: 264 - protein, 1256 aa, synthetic construct
QCVNLITRTQSYTNSFTRGVYYPDKVFRSSVLHSTQDLFLPFFSNVTWFHAIHVSGTNGTKRFDNPALPFNDGVYFASTEKSNIIRGWIFGTTLDSKTQSLLIVNNATNVVIKVCEFQFCNDPFLDVYQKNNKSWMESEFRVYSSANNCTFEYVSQPFLMDLVGKEGNFKNLREFVFKNIDGYFKIYSKHTPINLERDLPQGFSALEPLVDLPIGINITRFQTLLALHRSYLTPVDSSSGWTAGAAAYYVGYLQPRTFLLKYNENGTITDAVDCALDPLSETKCTLKSFTVEKGIYQTSNFRVQPTESIVRFPNITNLCPFHEVFNATTFASVYAWNRKRISNCVADYSVIYNFAPFFAFKCYGVSPTKLNDLCFTNVYADSFVIRGNEVSQIAPGQTGNIADYNYKLPDDFTGCVIAWNSNKLDSKPSGNYNYLYRLFRKSKLKPFERDISTEIYQAGNKPCNGVAGPNCYSPLQSYGFRPTYGVGHQPYRVVVLSFELLHAPATVCGPKKSTNLVKNKCVNFNFNGLTGTGVLTESNKKFLPFQQFGRDIADTTDAVRDPQTLEILDITPCSFGGVSVITPGTNTSNQVAVLYQGVNCTEVPVAIHADQLTPTWRVYSTGSNVFQTRAGCLIGAEYVNNSYECDIPIGAGICASYQTQTKSHQQAQSVASQSIIAYTMSLGAENSVAYSNNSIAIPTNFTISVTTEILPVSMTKTSVDCTMYICGDSTECSNLLLQYGSFCTQLKRALTGIAVEQDKNTQEVFAQVKQIYKTPPIKYFGGFNFSQILPDPSKPSKRSFIEDLLFNKVTLADAGFIKQYGDCLGDIAARDLICAQKFNGLTVLPPLLTDEMIAQYTSALLAGTITSGWTFGAGAALQIPFAMQMAYRFNGIGVTQNVLYENQKLIANQFNSAIGKIQDSLSSTASALGKLQDVVNHNAQALNTLVKQLSSKFGAISSVLNDILSRLDPPEAEVQIDRLITGRLQSLQTYVTQQLIRAAEIRASANLAATKMSECVLGQSKRVDFCGKGYHLMSFPQSAPHGVVFLHVTYVPAQEKNFTTAPAICHDGKAHFPREGVFVSNGTHWFVTQRNFYEPQIITTDNTFVSGNCDVVIGIVNNTVYDPLQPELDSFKEELDKYFKNHTSPDVDLGDISGINASVVNIQKEIDRLNEVAKNLNESLIDLQELGKYEQYIKWPWYIWLGFIAGLIAIVMVTIMLCCMTSCCSCLKGCCSCGSCCKFDEDDSEPVLKGVKLHYT

SEQ ID NO: 265 - protein, 1269 aa, synthetic construct
MFVFLVLLPLVSSQCVNLITRTQSYTNSFTRGVYYPDKVFRSSVLHSTQDLFLPFFSNVTWFHAIHVSGTNGTKRFDNPALPFNDGVYFASTEKSNIIRGWIFGTTLDSKTQSLLIVNNATNVVIKVCEFQFCNDPFLDVYQKNNKSWMESEFRVYSSANNCTFEYVSQPFLMDLEGKEGNFKNLREFVFKNIDGYFKIYSKHTPINLERDLPQGFSALEPLVDLPIGINITRFQTLLALHRSYLTPVDSSSGWTAGAAAYYVGYLQPRTFLLKYNENGTITDAVDCALDPLSETKCTLKSFTVEKGIYQTSNFRVQPTESIVRFPNITNLCPFHEVFNATTFASVYAWNRKRISNCVADYSVIYNFAPFFAFKCYGVSPTKLNDLCFTNVYADSFVIRGNEVSQIAPGQTGNIADYNYKLPDDFTGCVIAWNSNKLDSKPSGNYNYLYRLFRKSKLKPFERDISTEIYQAGNKPCNGVAGPNCYSPLQSYGFRPTYGVGHQPYRVVVLSFELLHAPATVCGPKKSTNLVKNKCVNFNFNGLTGTGVLTESNKKFLPFQQFGRDIADTTDAVRDPQTLEILDITPCSFGGVSVITPGTNTSNQVAVLYQGVNCTEVPVAIHADQLTPTWRVYSTGSNVFQTRAGCLIGAEYVNNSYECDIPIGAGICASYQTQTKSHRRARSVASQSIIAYTMSLGAENSVAYSNNSIAIPTNFTISVTTEILPVSMTKTSVDCTMYICGDSTECSNLLLQYGSFCTQLKRALTGIAVEQDKNTQEVFAQVKQIYKTPPIKYFGGFNFSQILPDPSKPSKRSFIEDLLFNKVTLADAGFIKQYGDCLGDIAARDLICAQKFNGLTVLPPLLTDEMIAQYTSALLAGTITSGWTFGAGAALQIPFAMQMAYRFNGIGVTQNVLYENQKLIANQFNSAIGKIQDSLSSTASALGKLQDVVNHNAQALNTLVKQLSSKFGAISSVLNDILSRLDKVEAEVQIDRLITGRLQSLQTYVTQQLIRAAEIRASANLAATKMSECVLGQSKRVDFCGKGYHLMSFPQSAPHGVVFLHVTYVPAQEKNFTTAPAICHDGKAHFPREGVFVSNGTHWFVTQRNFYEPQIITTDNTFVSGNCDVVIGIVNNTVYDPLQPELDSFKEELDKYFKNHTSPDVDLGDISGINASVVNIQKEIDRLNEVAKNLNESLIDLQELGKYEQYIKWPWYIWLGFIAGLIAIVMVTIMLCCMTSCCSCLKGCCSCGSCCKFDEDDSEPVLKGVKLHYT

SEQ ID NO: 266 - protein, 1269 aa, synthetic construct
MFVFLVLLPLVSSQCVNLITRTQSYTNSFTRGVYYPDKVFRSSVLHSTQDLFLPFFSNVTWFHAIHVSGTNGTKRFDNPALPFNDGVYFASTEKSNIIRGWIFGTTLDSKTQSLLIVNNATNVVIKVCEFQFCNDPFLDVYQKNNKSWMESEFRVYSSANNCTFEYVSQPFLMDLEGKEGNFKNLREFVFKNIDGYFKIYSKHTPINLERDLPQGFSALEPLVDLPIGINITRFQTLLALHRSYLTPVDSSSGWTAGAAAYYVGYLQPRTFLLKYNENGTITDAVDCALDPLSETKCTLKSFTVEKGIYQTSNFRVQPTESIVRFPNITNLCPFHEVFNATTFASVYAWNRKRISNCVADYSVIYNFAPFFAFKCYGVSPTKLNDLCFTNVYADSFVIRGNEVSQIAPGQTGNIADYNYKLPDDFTGCVIAWNSNKLDSKPSGNYNYLYRLFRKSKLKPFERDISTEIYQAGNKPCNGVAGPNCYSPLQSYGFRPTYGVGHQPYRVVVLSFELLHAPATVCGPKKSTNLVKNKCVNFNFNGLTGTGVLTESNKKFLPFQQFGRDIADTTDAVRDPQTLEILDITPCSFGGVSVITPGTNTSNQVAVLYQGVNCTEVPVAIHADQLTPTWRVYSTGSNVFQTRAGCLIGAEYVNNSYECDIPIGAGICASYQTQTKSHQQAQSVASQSIIAYTMSLGAENSVAYSNNSIAIPTNFTISVTTEILPVSMTKTSVDCTMYICGDSTECSNLLLQYGSFCTQLKRALTGIAVEQDKNTQEVFAQVKQIYKTPPIKYFGGFNFSQILPDPSKPSKRSFIEDLLFNKVTLADAGFIKQYGDCLGDIAARDLICAQKFNGLTVLPPLLTDEMIAQYTSALLAGTITSGWTFGAGAALQIPFAMQMAYRFNGIGVTQNVLYENQKLIANQFNSAIGKIQDSLSSTASALGKLQDVVNHNAQALNTLVKQLSSKFGAISSVLNDILSRLDPPEAEVQIDRLITGRLQSLQTYVTQQLIRAAEIRASANLAATKMSECVLGQSKRVDFCGKGYHLMSFPQSAPHGVVFLHVTYVPAQEKNFTTAPAICHDGKAHFPREGVFVSNGTHWFVTQRNFYEPQIITTDNTFVSGNCDVVIGIVNNTVYDPLQPELDSFKEELDKYFKNHTSPDVDLGDISGINASVVNIQKEIDRLNEVAKNLNESLIDLQELGKYEQYIKWPWYIWLGFIAGLIAIVMVTIMLCCMTSCCSCLKGCCSCGSCCKFDEDDSEPVLKGVKLHYT

SEQ ID NO: 267 - protein, 1269 aa, synthetic construct
MFVFLVLLPLVSSQCVNLITRTQSYTNSFTRGVYYPDKVFRSSVLHSTQDLFLPFFSNVTWFHAIHVSGTNGTKRFDNPALPFNDGVYFASTEKSNIIRGWIFGTTLDSKTQSLLIVNNATNVVIKVCEFQFCNDPFLDVYQKNNKSWMESEFRVYSSANNCTFEYVSQPFLMDLEGKEGNFKNLREFVFKNIDGYFKIYSKHTPINLERDLPQGFSALEPLVDLPIGINITRFQTLLALHRSYLTPVDSSSGWTAGAAAYYVGYLQPRTFLLKYNENGTITDAVDCALDPLSETKCTLKSFTVEKGIYQTSNFRVQPTESIVRFPNITNLCPFHEVFNATTFASVYAWNRKRISNCVADYSVIYNFAPFFAFKCYGVSPTKLNDLCFTNVYADSFVIRGNEVSQIAPGQTGNIADYNYKLPDDFTGCVIAWNSNKLDSKPSGNYNYLYRLFRKSKLKPFERDISTEIYQAGNKPCNGVAGPNCYSPLQSYGFRPTYGVGHQPYRVVVLSFELLHASATVCGPKKSTNLVKNKCVNFNFNGLTGTGVLTESNKKFLPFQQFGRDIADTTDAVRDPQTLEILDITPCSFGGVSVITPGTNTSNQVAVLYQGVNCTEVPVAIHADQLTPTWRVYSTGSNVFQTRAGCLIGAEYVNNSYECDIPIGAGICASYQTQTKSHRRARSVASQSIIAYTMSLGAENSVAYSNNSIAIPTNFTISVTTEILPVSMTKTSVDCTMYICGDSTECSNLLLQYGSFCTQLKRALTGIAVEQDKNTQEVFAQVKQIYKTPPIKYFGGFNFSQILPDPSKPSKRSFIEDLLFNKVTLADAGFIKQYGDCLGDIAARDLICAQKFNGLTVLPPLLTDEMIAQYTSALLAGTITSGWTFGAGAALQIPFAMQMAYRFNGIGVTQNVLYENQKLIANQFNSAIGKIQDSLSSTASALGKLQDVVNHNAQALNTLVKQLSSKFGAISSVLNDILSRLDKVEAEVQIDRLITGRLQSLQTYVTQQLIRAAEIRASANLAATKMSECVLGQSKRVDFCGKGYHLMSFPQSAPHGVVFLHVTYVPAQEKNFTTAPAICHDGKAHFPREGVFVSNGTHWFVTQRNFYEPQIITTDNTFVSGNCDVVIGIVNNTVYDPLQPELDSFKEELDKYFKNHTSPDVDLGDISGINASVVNIQKEIDRLNEVAKNLNESLIDLQELGKYEQYIKWPWYIWLGFIAGLIAIVMVTIMLCCMTSCCSCLKGCCSCGSCCKFDEDDSEPVLKGVKLHYT

SEQ ID NO: 268 - protein, 1269 aa, synthetic construct
MFVFLVLLPLVSSQCVNLITRTQSYTNSFTRGVYYPDKVFRSSVLHSTQDLFLPFFSNVTWFHAIHVSGTNGTKRFDNPALPFNDGVYFASTEKSNIIRGWIFGTTLDSKTQSLLIVNNATNVVIKVCEFQFCNDPFLDVYQKNNKSWMESEFRVYSSANNCTFEYVSQPFLMDLEGKEGNFKNLREFVFKNIDGYFKIYSKHTPINLERDLPQGFSALEPLVDLPIGINITRFQTLLALHRSYLTPVDSSSGWTAGAAAYYVGYLQPRTFLLKYNENGTITDAVDCALDPLSETKCTLKSFTVEKGIYQTSNFRVQPTESIVRFPNITNLCPFHEVFNATTFASVYAWNRKRISNCVADYSVIYNFAPFFAFKCYGVSPTKLNDLCFTNVYADSFVIRGNEVSQIAPGQTGNIADYNYKLPDDFTGCVIAWNSNKLDSKPSGNYNYLYRLFRKSKLKPFERDISTEIYQAGNKPCNGVAGPNCYSPLQSYGFRPTYGVGHQPYRVVVLSFELLHASATVCGPKKSTNLVKNKCVNFNFNGLTGTGVLTESNKKFLPFQQFGRDIADTTDAVRDPQTLEILDITPCSFGGVSVITPGTNTSNQVAVLYQGVNCTEVPVAIHADQLTPTWRVYSTGSNVFQTRAGCLIGAEYVNNSYECDIPIGAGICASYQTQTKSHQQAQSVASQSIIAYTMSLGAENSVAYSNNSIAIPTNFTISVTTEILPVSMTKTSVDCTMYICGDSTECSNLLLQYGSFCTQLKRALTGIAVEQDKNTQEVFAQVKQIYKTPPIKYFGGFNFSQILPDPSKPSKRSFIEDLLFNKVTLADAGFIKQYGDCLGDIAARDLICAQKFNGLTVLPPLLTDEMIAQYTSALLAGTITSGWTFGAGAALQIPFAMQMAYRFNGIGVTQNVLYENQKLIANQFNSAIGKIQDSLSSTASALGKLQDVVNHNAQALNTLVKQLSSKFGAISSVLNDILSRLDPPEAEVQIDRLITGRLQSLQTYVTQQLIRAAEIRASANLAATKMSECVLGQSKRVDFCGKGYHLMSFPQSAPHGVVFLHVTYVPAQEKNFTTAPAICHDGKAHFPREGVFVSNGTHWFVTQRNFYEPQIITTDNTFVSGNCDVVIGIVNNTVYDPLQPELDSFKEELDKYFKNHTSPDVDLGDISGINASVVNIQKEIDRLNEVAKNLNESLIDLQELGKYEQYIKWPWYIWLGFIAGLIAIVMVTIMLCCMTSCCSCLKGCCSCGSCCKFDEDDSEPVLKGVKLHYT

SEQ ID NO: 269 - protein, 1269 aa, synthetic construct
MFVFLVLLPLVSSQCVNLITRTQSYTNSFTRGVYYPDKVFRSSVLHSTQDLFLPFFSNVTWFHAIHVSGTNGTKRFDNPALPFNDGVYFASTEKSNIIRGWIFGTTLDSKTQSLLIVNNATNVVIKVCEFQFCNDPFLDVYQKNNKSWMESEFRVYSSANNCTFEYVSQPFLMDLEGKEGNFKNLREFVFKNIDGYFKIYSKHTPINLERDLPQGFSALEPLVDLPIGINITRFQTLLALHRSYLTPVDSSSGWTAGAAAYYVGYLQPRTFLLKYNENGTITDAVDCALDPLSETKCTLKSFTVEKGIYQTSNFRVQPTESIVRFPNITNLCPFHEVFNATTFASVYAWNRKRISNCVADYSVIYNFAPFFAFKCYGVSPTKLNDLCFTNVYADSFVIRGNEVSQIAPGQTGNIADYNYKLPDDFTGCVIAWNSNKLDSTPSGNYNYLYRLFRKSKLKPFERDISTEIYQAGNKPCNGVAGPNCYSPLQSYGFRPTYGVGHQPYRVVVLSFELLHAPATVCGPKKSTNLVKNKCVNFNFNGLTGTGVLTESNKKFLPFQQFGRDIADTTDAVRDPQTLEILDITPCSFGGVSVITPGTNTSNQVAVLYQGVNCTEVPVAIHADQLTPTWRVYSTGSNVFQTRAGCLIGAEYVNNSYECDIPIGAGICASYQTQTKSHRRARSVASQSIIAYTMSLGAENSVAYSNNSIAIPTNFTISVTTEILPVSMTKTSVDCTMYICGDSTECSNLLLQYGSFCTQLKRALTGIAVEQDKNTQEVFAQVKQIYKTPPIKYFGGFNFSQILPDPSKPSKRSFIEDLLFNKVTLADAGFIKQYGDCLGDIAARDLICAQKFNGLTVLPPLLTDEMIAQYTSALLAGTITSGWTFGAGAALQIPFAMQMAYRFNGIGVTQNVLYENQKLIANQFNSAIGKIQDSLSSTASALGKLQDVVNHNAQALNTLVKQLSSKFGAISSVLNDILSRLDKVEAEVQIDRLITGRLQSLQTYVTQQLIRAAEIRASANLAATKMSECVLGQSKRVDFCGKGYHLMSFPQSAPHGVVFLHVTYVPAQEKNFTTAPAICHDGKAHFPREGVFVSNGTHWFVTQRNFYEPQIITTDNTFVSGNCDVVIGIVNNTVYDPLQPELDSFKEELDKYFKNHTSPDVDLGDISGINASVVNIQKEIDRLNEVAKNLNESLIDLQELGKYEQYIKWPWYIWLGFIAGLIAIVMVTIMLCCMTSCCSCLKGCCSCGSCCKFDEDDSEPVLKGVKLHYT

SEQ ID NO: 270 - protein, 1269 aa, synthetic construct
MFVFLVLLPLVSSQCVNLITRTQSYTNSFTRGVYYPDKVFRSSVLHSTQDLFLPFFSNVTWFHAIHVSGTNGTKRFDNPALPFNDGVYFASTEKSNIIRGWIFGTTLDSKTQSLLIVNNATNVVIKVCEFQFCNDPFLDVYQKNNKSWMESEFRVYSSANNCTFEYVSQPFLMDLEGKEGNFKNLREFVFKNIDGYFKIYSKHTPINLERDLPQGFSALEPLVDLPIGINITRFQTLLALHRSYLTPVDSSSGWTAGAAAYYVGYLQPRTFLLKYNENGTITDAVDCALDPLSETKCTLKSFTVEKGIYQTSNFRVQPTESIVRFPNITNLCPFHEVFNATTFASVYAWNRKRISNCVADYSVIYNFAPFFAFKCYGVSPTKLNDLCFTNVYADSFVIRGNEVSQIAPGQTGNIADYNYKLPDDFTGCVIAWNSNKLDSTPSGNYNYLYRLFRKSKLKPFERDISTEIYQAGNKPCNGVAGPNCYSPLQSYGFRPTYGVGHQPYRVVVLSFELLHAPATVCGPKKSTNLVKNKCVNFNFNGLTGTGVLTESNKKFLPFQQFGRDIADTTDAVRDPQTLEILDITPCSFGGVSVITPGTNTSNQVAVLYQGVNCTEVPVAIHADQLTPTWRVYSTGSNVFQTRAGCLIGAEYVNNSYECDIPIGAGICASYQTQTKSHQQAQSVASQSIIAYTMSLGAENSVAYSNNSIAIPTNFTISVTTEILPVSMTKTSVDCTMYICGDSTECSNLLLQYGSFCTQLKRALTGIAVEQDKNTQEVFAQVKQIYKTPPIKYFGGFNFSQILPDPSKPSKRSFIEDLLFNKVTLADAGFIKQYGDCLGDIAARDLICAQKFNGLTVLPPLLTDEMIAQYTSALLAGTITSGWTFGAGAALQIPFAMQMAYRFNGIGVTQNVLYENQKLIANQFNSAIGKIQDSLSSTASALGKLQDVVNHNAQALNTLVKQLSSKFGAISSVLNDILSRLDPPEAEVQIDRLITGRLQSLQTYVTQQLIRAAEIRASANLAATKMSECVLGQSKRVDFCGKGYHLMSFPQSAPHGVVFLHVTYVPAQEKNFTTAPAICHDGKAHFPREGVFVSNGTHWFVTQRNFYEPQIITTDNTFVSGNCDVVIGIVNNTVYDPLQPELDSFKEELDKYFKNHTSPDVDLGDISGINASVVNIQKEIDRLNEVAKNLNESLIDLQELGKYEQYIKWPWYIWLGFIAGLIAIVMVTIMLCCMTSCCSCLKGCCSCGSCCKFDEDDSEPVLKGVKLHYT

SEQ ID NO: 271 - protein, 1269 aa, synthetic construct
MFVFLVLLPLVSSQCVNLITRTQSYTNSFTRGVYYPDKVFRSSVLHSTQDLFLPFFSNVTWFHAIHVSGTNGTKRFDNPALPFNDGVYFASTEKSNIIRGWIFGTTLDSKTQSLLIVNNATNVVIKVCEFQFCNDPFLDVYQKNNKSWMESEFRVYSSANNCTFEYVSQPFLMDLEGKEGNFKNLREFVFKNIDGYFKIYSKHTPINLERDLPQGFSALEPLVDLPIGINITRFQTLLALHRSYLTPVDSSSGWTAGAAAYYVGYLQPRTFLLKYNENGTITDAVDCALDPLSETKCTLKSFTVEKGIYQTSNFRVQPTESIVRFPNITNLCPFHEVFNATTFASVYAWNRKRISNCVADYSVIYNFAPFFAFKCYGVSPTKLNDLCFTNVYADSFVIRGNEVSQIAPGQTGNIADYNYKLPDDFTGCVIAWNSNKLDSKPSGNYNYLYRLFRKSKLKPFERDISTEIYQAGNKPCNGVAGSNCYSPLQSYGFRPTYGVGHQPYRVVVLSFELLHAPATVCGPKKSTNLVKNKCVNFNFNGLTGTGVLTESNKKFLPFQQFGRDIADTTDAVRDPQTLEILDITPCSFGGVSVITPGTNTSNQVAVLYQGVNCTEVPVAIHADQLTPTWRVYSTGSNVFQTRAGCLIGAEYVNNSYECDIPIGAGICASYQTQTKSHRRARSVASQSIIAYTMSLGAENSVAYSNNSIAIPTNFTISVTTEILPVSMTKTSVDCTMYICGDSTECSNLLLQYGSFCTQLKRALTGIAVEQDKNTQEVFAQVKQIYKTPPIKYFGGFNFSQILPDPSKPSKRSFIEDLLFNKVTLADAGFIKQYGDCLGDIAARDLICAQKFNGLTVLPPLLTDEMIAQYTSALLAGTITSGWTFGAGAALQIPFAMQMAYRFNGIGVTQNVLYENQKLIANQFNSAIGKIQDSLSSTASALGKLQDVVNHNAQALNTLVKQLSSKFGAISSVLNDILSRLDKVEAEVQIDRLITGRLQSLQTYVTQQLIRAAEIRASANLAATKMSECVLGQSKRVDFCGKGYHLMSFPQSAPHGVVFLHVTYVPAQEKNFTTAPAICHDGKAHFPREGVFVSNGTHWFVTQRNFYEPQIITTDNTFVSGNCDVVIGIVNNTVYDPLQPELDSFKEELDKYFKNHTSPDVDLGDISGINASVVNIQKEIDRLNEVAKNLNESLIDLQELGKYEQYIKWPWYIWLGFIAGLIAIVMVTIMLCCMTSCCSCLKGCCSCGSCCKFDEDDSEPVLKGVKLHYT

SEQ ID NO: 272 - protein, 1269 aa, synthetic construct; identical to SEQ ID NO: 230

SEQ ID NO: 273 - protein, 1256 aa, synthetic construct
QCVNLITRTQSYTNSFTRGVYYPDKVFRSSVLHSTQDLFLPFFSNVTWFHAIHVSGTNGTKRFDNPALPFNDGVYFASTEKSNIIRGWIFGTTLDSKTQSLLIVNNATNVVIKVCEFQFCNDPFLDVYQKNNKSWMESEFRVYSSANNCTFEYVSQPFLMDLEGKEGNFKNLREFVFKNIDGYFKIYSKHTPINLERDLPQGFSALEPLVDLPIGINITRFQTLLALHRSYLTPVDSSSGWTAGAAAYYVGYLQPRTFLLKYNENGTITDAVDCALDPLSETKCTLKSFTVEKGIYQTSNFRVQPTESIVRFPNITNLCPFHEVFNATTFASVYAWNRKRISNCVADYSVIYNFAPFFAFKCYGVSPTKLNDLCFTNVYADSFVIRGNEVSQIAPGQTGNIADYNYKLPDDFTGCVIAWNSNKLDSKPSGNYNYLYRLFRKSKLKPFERDISTEIYQAGNKPCNGVAGPNCYSPLQSYGFRPTYGVGHQPYRVVVLSFELLHAPATVCGPKKSTNLVKNKCVNFNFNGLTGTGVLTESNKKFLPFQQFGRDIADTTDAVRDPQTLEILDITPCSFGGVSVITPGTNTSNQVAVLYQGVNCTEVPVAIHADQLTPTWRVYSTGSNVFQTRAGCLIGAEYVNNSYECDIPIGAGICASYQTQTKSHRRARSVASQSIIAYTMSLGAENSVAYSNNSIAIPTNFTISVTTEILPVSMTKTSVDCTMYICGDSTECSNLLLQYGSFCTQLKRALTGIAVEQDKNTQEVFAQVKQIYKTPPIKYFGGFNFSQILPDPSKPSKRSFIEDLLFNKVTLADAGFIKQYGDCLGDIAARDLICAQKFNGLTVLPPLLTDEMIAQYTSALLAGTITSGWTFGAGAALQIPFAMQMAYRFNGIGVTQNVLYENQKLIANQFNSAIGKIQDSLSSTASALGKLQDVVNHNAQALNTLVKQLSSKFGAISSVLNDILSRLDKVEAEVQIDRLITGRLQSLQTYVTQQLIRAAEIRASANLAATKMSECVLGQSKRVDFCGKGYHLMSFPQSAPHGVVFLHVTYVPAQEKNFTTAPAICHDGKAHFPREGVFVSNGTHWFVTQRNFYEPQIITTDNTFVSGNCDVVIGIVNNTVYDPLQPELDSFKEELDKYFKNHTSPDVDLGDISGINASVVNIQKEIDRLNEVAKNLNESLIDLQELGKYEQYIKWPWYIWLGFIAGLIAIVMVTIMLCCMTSCCSCLKGCCSCGSCCKFDEDDSEPVLKGVKLHYT

SEQ ID NO: 274 - protein, 1256 aa, synthetic construct
QCVNLITRTQSYTNSFTRGVYYPDKVFRSSVLHSTQDLFLPFFSNVTWFHAIHVSGTNGTKRFDNPALPFNDGVYFASTEKSNIIRGWIFGTTLDSKTQSLLIVNNATNVVIKVCEFQFCNDPFLDVYQKNNKSWMESEFRVYSSANNCTFEYVSQPFLMDLEGKEGNFKNLREFVFKNIDGYFKIYSKHTPINLERDLPQGFSALEPLVDLPIGINITRFQTLLALHRSYLTPVDSSSGWTAGAAAYYVGYLQPRTFLLKYNENGTITDAVDCALDPLSETKCTLKSFTVEKGIYQTSNFRVQPTESIVRFPNITNLCPFHEVFNATTFASVYAWNRKRISNCVADYSVIYNFAPFFAFKCYGVSPTKLNDLCFTNVYADSFVIRGNEVSQIAPGQTGNIADYNYKLPDDFTGCVIAWNSNKLDSKPSGNYNYLYRLFRKSKLKPFERDISTEIYQAGNKPCNGVAGPNCYSPLQSYGFRPTYGVGHQPYRVVVLSFELLHAPATVCGPKKSTNLVKNKCVNFNFNGLTGTGVLTESNKKFLPFQQFGRDIADTTDAVRDPQTLEILDITPCSFGGVSVITPGTNTSNQVAVLYQGVNCTEVPVAIHADQLTPTWRVYSTGSNVFQTRAGCLIGAEYVNNSYECDIPIGAGICASYQTQTKSHQQAQSVASQSIIAYTMSLGAENSVAYSNNSIAIPTNFTISVTTEILPVSMTKTSVDCTMYICGDSTECSNLLLQYGSFCTQLKRALTGIAVEQDKNTQEVFAQVKQIYKTPPIKYFGGFNFSQILPDPSKPSKRSFIEDLLFNKVTLADAGFIKQYGDCLGDIAARDLICAQKFNGLTVLPPLLTDEMIAQYTSALLAGTITSGWTFGAGAALQIPFAMQMAYRFNGIGVTQNVLYENQKLIANQFNSAIGKIQDSLSSTASALGKLQDVVNHNAQALNTLVKQLSSKFGAISSVLNDILSRLDPPEAEVQIDRLITGRLQSLQTYVTQQLIRAAEIRASANLAATKMSECVLGQSKRVDFCGKGYHLMSFPQSAPHGVVFLHVTYVPAQEKNFTTAPAICHDGKAHFPREGVFVSNGTHWFVTQRNFYEPQIITTDNTFVSGNCDVVIGIVNNTVYDPLQPELDSFKEELDKYFKNHTSPDVDLGDISGINASVVNIQKEIDRLNEVAKNLNESLIDLQELGKYEQYIKWPWYIWLGFIAGLIAIVMVTIMLCCMTSCCSCLKGCCSCGSCCKFDEDDSEPVLKGVKLHYT

SEQ ID NO: 275 - protein, 1256 aa, synthetic construct
QCVNLITRTQSYTNSFTRGVYYPDKVFRSSVLHSTQDLFLPFFSNVTWFHAIHVSGTNGTKRFDNPALPFNDGVYFASTEKSNIIRGWIFGTTLDSKTQSLLIVNNATNVVIKVCEFQFCNDPFLDVYQKNNKSWMESEFRVYSSANNCTFEYVSQPFLMDLEGKEGNFKNLREFVFKNIDGYFKIYSKHTPINLERDLPQGFSALEPLVDLPIGINITRFQTLLALHRSYLTPVDSSSGWTAGAAAYYVGYLQPRTFLLKYNENGTITDAVDCALDPLSETKCTLKSFTVEKGIYQTSNFRVQPTESIVRFPNITNLCPFHEVFNATTFASVYAWNRKRISNCVADYSVIYNFAPFFAFKCYGVSPTKLNDLCFTNVYADSFVIRGNEVSQIAPGQTGNIADYNYKLPDDFTGCVIAWNSNKLDSKPSGNYNYLYRLFRKSKLKPFERDISTEIYQAGNKPCNGVAGPNCYSPLQSYGFRPTYGVGHQPYRVVVLSFELLHASATVCGPKKSTNLVKNKCVNFNFNGLTGTGVLTESNKKFLPFQQFGRDIADTTDAVRDPQTLEILDITPCSFGGVSVITPGTNTSNQVAVLYQGVNCTEVPVAIHADQLTPTWRVYSTGSNVFQTRAGCLIGAEYVNNSYECDIPIGAGICASYQTQTKSHRRARSVASQSIIAYTMSLGAENSVAYSNNSIAIPTNFTISVTTEILPVSMTKTSVDCTMYICGDSTECSNLLLQYGSFCTQLKRALTGIAVEQDKNTQEVFAQVKQIYKTPPIKYFGGFNFSQILPDPSKPSKRSFIEDLLFNKVTLADAGFIKQYGDCLGDIAARDLICAQKFNGLTVLPPLLTDEMIAQYTSALLAGTITSGWTFGAGAALQIPFAMQMAYRFNGIGVTQNVLYENQKLIANQFNSAIGKIQDSLSSTASALGKLQDVVNHNAQALNTLVKQLSSKFGAISSVLNDILSRLDKVEAEVQIDRLITGRLQSLQTYVTQQLIRAAEIRASANLAATKMSECVLGQSKRVDFCGKGYHLMSFPQSAPHGVVFLHVTYVPAQEKNFTTAPAICHDGKAHFPREGVFVSNGTHWFVTQRNFYEPQIITTDNTFVSGNCDVVIGIVNNTVYDPLQPELDSFKEELDKYFKNHTSPDVDLGDISGINASVVNIQKEIDRLNEVAKNLNESLIDLQELGKYEQYIKWPWYIWLGFIAGLIAIVMVTIMLCCMTSCCSCLKGCCSCGSCCKFDEDDSEPVLKGVKLHYT

SEQ ID NO: 276 - protein, 1256 aa, synthetic construct
QCVNLITRTQSYTNSFTRGVYYPDKVFRSSVLHSTQDLFLPFFSNVTWFHAIHVSGTNGTKRFDNPALPFNDGVYFASTEKSNIIRGWIFGTTLDSKTQSLLIVNNATNVVIKVCEFQFCNDPFLDVYQKNNKSWMESEFRVYSSANNCTFEYVSQPFLMDLEGKEGNFKNLREFVFKNIDGYFKIYSKHTPINLERDLPQGFSALEPLVDLPIGINITRFQTLLALHRSYLTPVDSSSGWTAGAAAYYVGYLQPRTFLLKYNENGTITDAVDCALDPLSETKCTLKSFTVEKGIYQTSNFRVQPTESIVRFPNITNLCPFHEVFNATTFASVYAWNRKRISNCVADYSVIYNFAPFFAFKCYGVSPTKLNDLCFTNVYADSFVIRGNEVSQIAPGQTGNIADYNYKLPDDFTGCVIAWNSNKLDSKPSGNYNYLYRLFRKSKLKPFERDISTEIYQAGNKPCNGVAGPNCYSPLQSYGFRPTYGVGHQPYRVVVLSFELLHASATVCGPKKSTNLVKNKCVNFNFNGLTGTGVLTESNKKFLPFQQFGRDIADTTDAVRDPQTLEILDITPCSFGGVSVITPGTNTSNQVAVLYQGVNCTEVPVAIHADQLTPTWRVYSTGSNVFQTRAGCLIGAEYVNNSYECDIPIGAGICASYQTQTKSHQQAQSVASQSIIAYTMSLGAENSVAYSNNSIAIPTNFTISVTTEILPVSMTKTSVDCTMYICGDSTECSNLLLQYGSFCTQLKRALTGIAVEQDKNTQEVFAQVKQIYKTPPIKYFGGFNFSQILPDPSKPSKRSFIEDLLFNKVTLADAGFIKQYGDCLGDIAARDLICAQKFNGLTVLPPLLTDEMIAQYTSALLAGTITSGWTFGAGAALQIPFAMQMAYRFNGIGVTQNVLYENQKLIANQFNSAIGKIQDSLSSTASALGKLQDVVNHNAQALNTLVKQLSSKFGAISSVLNDILSRLDPPEAEVQIDRLITGRLQSLQTYVTQQLIRAAEIRASANLAATKMSECVLGQSKRVDFCGKGYHLMSFPQSAPHGVVFLHVTYVPAQEKNFTTAPAICHDGKAHFPREGVFVSNGTHWFVTQRNFYEPQIITTDNTFVSGNCDVVIGIVNNTVYDPLQPELDSFKEELDKYFKNHTSPDVDLGDISGINASVVNIQKEIDRLNEVAKNLNESLIDLQELGKYEQYIKWPWYIWLGFIAGLIAIVMVTIMLCCMTSCCSCLKGCCSCGSCCKFDEDDSEPVLKGVKLHYT

SEQ ID NO: 277 - protein, 1256 aa, synthetic construct
QCVNLITRTQSYTNSFTRGVYYPDKVFRSSVLHSTQDLFLPFFSNVTWFHAIHVSGTNGTKRFDNPALPFNDGVYFASTEKSNIIRGWIFGTTLDSKTQSLLIVNNATNVVIKVCEFQFCNDPFLDVYQKNNKSWMESEFRVYSSANNCTFEYVSQPFLMDLEGKEGNFKNLREFVFKNIDGYFKIYSKHTPINLERDLPQGFSALEPLVDLPIGINITRFQTLLALHRSYLTPVDSSSGWTAGAAAYYVGYLQPRTFLLKYNENGTITDAVDCALDPLSETKCTLKSFTVEKGIYQTSNFRVQPTESIVRFPNITNLCPFHEVFNATTFASVYAWNRKRISNCVADYSVIYNFAPFFAFKCYGVSPTKLNDLCFTNVYADSFVIRGNEVSQIAPGQTGNIADYNYKLPDDFTGCVIAWNSNKLDSTPSGNYNYLYRLFRKSKLKPFERDISTEIYQAGNKPCNGVAGPNCYSPLQSYGFRPTYGVGHQPYRVVVLSFELLHAPATVCGPKKSTNLVKNKCVNFNFNGLTGTGVLTESNKKFLPFQQFGRDIADTTDAVRDPQTLEILDITPCSFGGVSVITPGTNTSNQVAVLYQGVNCTEVPVAIHADQLTPTWRVYSTGSNVFQTRAGCLIGAEYVNNSYECDIPIGAGICASYQTQTKSHRRARSVASQSIIAYTMSLGAENSVAYSNNSIAIPTNFTISVTTEILPVSMTKTSVDCTMYICGDSTECSNLLLQYGSFCTQLKRALTGIAVEQDKNTQEVFAQVKQIYKTPPIKYFGGFNFSQILPDPSKPSKRSFIEDLLFNKVTLADAGFIKQYGDCLGDIAARDLICAQKFNGLTVLPPLLTDEMIAQYTSALLAGTITSGWTFGAGAALQIPFAMQMAYRFNGIGVTQNVLYENQKLIANQFNSAIGKIQDSLSSTASALGKLQDVVNHNAQALNTLVKQLSSKFGAISSVLNDILSRLDKVEAEVQIDRLITGRLQSLQTYVTQQLIRAAEIRASANLAATKMSECVLGQSKRVDFCGKGYHLMSFPQSAPHGVVFLHVTYVPAQEKNFTTAPAICHDGKAHFPREGVFVSNGTHWFVTQRNFYEPQIITTDNTFVSGNCDVVIGIVNNTVYDPLQPELDSFKEELDKYFKNHTSPDVDLGDISGINASVVNIQKEIDRLNEVAKNLNESLIDLQELGKYEQYIKWPWYIWLGFIAGLIAIVMVTIMLCCMTSCCSCLKGCCSCGSCCKFDEDDSEPVLKGVKLHYT

SEQ ID NO: 278 - protein, 1256 aa, synthetic construct
QCVNLITRTQSYTNSFTRGVYYPDKVFRSSVLHSTQDLFLPFFSNVTWFHAIHVSGTNGTKRFDNPALPFNDGVYFASTEKSNIIRGWIFGTTLDSKTQSLLIVNNATNVVIKVCEFQFCNDPFLDVYQKNNKSWMESEFRVYSSANNCTFEYVSQPFLMDLEGKEGNFKNLREFVFKNIDGYFKIYSKHTPINLERDLPQGFSALEPLVDLPIGINITRFQTLLALHRSYLTPVDSSSGWTAGAAAYYVGYLQPRTFLLKYNENGTITDAVDCALDPLSETKCTLKSFTVEKGIYQTSNFRVQPTESIVRFPNITNLCPFHEVFNATTFASVYAWNRKRISNCVADYSVIYNFAPFFAFKCYGVSPTKLNDLCFTNVYADSFVIRGNEVSQIAPGQTGNIADYNYKLPDDFTGCVIAWNSNKLDSTPSGNYNYLYRLFRKSKLKPFERDISTEIYQAGNKPCNGVAGPNCYSPLQSYGFRPTYGVGHQPYRVVVLSFELLHAPATVCGPKKSTNLVKNKCVNFNFNGLTGTGVLTESNKKFLPFQQFGRDIADTTDAVRDPQTLEILDITPCSFGGVSVITPGTNTSNQVAVLYQGVNCTEVPVAIHADQLTPTWRVYSTGSNVFQTRAGCLIGAEYVNNSYECDIPIGAGICASYQTQTKSHQQAQSVASQSIIAYTMSLGAENSVAYSNNSIAIPTNFTISVTTEILPVSMTKTSVDCTMYICGDSTECSNLLLQYGSFCTQLKRALTGIAVEQDKNTQEVFAQVKQIYKTPPIKYFGGFNFSQILPDPSKPSKRSFIEDLLFNKVTLADAGFIKQYGDCLGDIAARDLICAQKFNGLTVLPPLLTDEMIAQYTSALLAGTITSGWTFGAGAALQIPFAMQMAYRFNGIGVTQNVLYENQKLIANQFNSAIGKIQDSLSSTASALGKLQDVVNHNAQALNTLVKQLSSKFGAISSVLNDILSRLDPPEAEVQIDRLITGRLQSLQTYVTQQLIRAAEIRASANLAATKMSECVLGQSKRVDFCGKGYHLMSFPQSAPHGVVFLHVTYVPAQEKNFTTAPAICHDGKAHFPREGVFVSNGTHWFVTQRNFYEPQIITTDNTFVSGNCDVVIGIVNNTVYDPLQPELDSFKEELDKYFKNHTSPDVDLGDISGINASVVNIQKEIDRLNEVAKNLNESLIDLQELGKYEQYIKWPWYIWLGFIAGLIAIVMVTIMLCCMTSCCSCLKGCCSCGSCCKFDEDDSEPVLKGVKLHYT

SEQ ID NO: 279 - protein, 1256 aa, synthetic construct
QCVNLITRTQSYTNSFTRGVYYPDKVFRSSVLHSTQDLFLPFFSNVTWFHAIHVSGTNGTKRFDNPALPFNDGVYFASTEKSNIIRGWIFGTTLDSKTQSLLIVNNATNVVIKVCEFQFCNDPFLDVYQKNNKSWMESEFRVYSSANNCTFEYVSQPFLMDLEGKEGNFKNLREFVFKNIDGYFKIYSKHTPINLERDLPQGFSALEPLVDLPIGINITRFQTLLALHRSYLTPVDSSSGWTAGAAAYYVGYLQPRTFLLKYNENGTITDAVDCALDPLSETKCTLKSFTVEKGIYQTSNFRVQPTESIVRFPNITNLCPFHEVFNATTFASVYAWNRKRISNCVADYSVIYNFAPFFAFKCYGVSPTKLNDLCFTNVYADSFVIRGNEVSQIAPGQTGNIADYNYKLPDDFTGCVIAWNSNKLDSKPSGNYNYLYRLFRKSKLKPFERDISTEIYQAGNKPCNGVAGSNCYSPLQSYGFRPTYGVGHQPYRVVVLSFELLHAPATVCGPKKSTNLVKNKCVNFNFNGLTGTGVLTESNKKFLPFQQFGRDIADTTDAVRDPQTLEILDITPCSFGGVSVITPGTNTSNQVAVLYQGVNCTEVPVAIHADQLTPTWRVYSTGSNVFQTRAGCLIGAEYVNNSYECDIPIGAGICASYQTQTKSHRRARSVASQSIIAYTMSLGAENSVAYSNNSIAIPTNFTISVTTEILPVSMTKTSVDCTMYICGDSTECSNLLLQYGSFCTQLKRALTGIAVEQDKNTQEVFAQVKQIYKTPPIKYFGGFNFSQILPDPSKPSKRSFIEDLLFNKVTLADAGFIKQYGDCLGDIAARDLICAQKFNGLTVLPPLLTDEMIAQYTSALLAGTITSGWTFGAGAALQIPFAMQMAYRFNGIGVTQNVLYENQKLIANQFNSAIGKIQDSLSSTASALGKLQDVVNHNAQALNTLVKQLSSKFGAISSVLNDILSRLDKVEAEVQIDRLITGRLQSLQTYVTQQLIRAAEIRASANLAATKMSECVLGQSKRVDFCGKGYHLMSFPQSAPHGVVFLHVTYVPAQEKNFTTAPAICHDGKAHFPREGVFVSNGTHWFVTQRNFYEPQIITTDNTFVSGNCDVVIGIVNNTVYDPLQPELDSFKEELDKYFKNHTSPDVDLGDISGINASVVNIQKEIDRLNEVAKNLNESLIDLQELGKYEQYIKWPWYIWLGFIAGLIAIVMVTIMLCCMTSCCSCLKGCCSCGSCCKFDEDDSEPVLKGVKLHYT

SEQ ID NO: 280 - protein, 1256 aa, synthetic construct; identical to SEQ ID NO: 234

SEQ ID NO: 281 - protein, 1269 aa, synthetic construct
MFVFLVLLPLVSSQCVNLITRTQSYTNSFTRGVYYPDKVFRSSVLHSTQDLFLPFFSNVTWFHAIHVSGTNGTKRFDNPALPFNDGVYFASTEKSNIIRGWIFGTTLDSKTQSLLIVNNATNVVIKVCEFQFCNDPFLDVYQKNNKSWMESEFRVYSSANNCTFEYVSQPFLMDLEGKEGNFKNLREFVFKNIDGYFKIYSKHTPINLERDLPQGFSALEPLVDLPIGINITRFQTLLALHRSYLTPGGSSSGWTAGAAAYYVGYLQPRTFLLKYNENGTITDAVDCALDPLSETKCTLKSFTVEKGIYQTSNFRVQPTESIVRFPNITNLCPFHEVFNATTFASVYAWNRKRISNCVADYSVIYNFAPFFAFKCYGVSPTKLNDLCFTNVYADSFVIRGNEVSQIAPGQTGNIADYNYKLPDDFTGCVIAWNSNKLDSKPSGNYNYLYRLFRKSKLKPFERDISTEIYQAGNKPCNGVAGPNCYSPLQSYGFRPTYGVGHQPYRVVVLSFELLHASATVCGPKKSTNLVKNKCVNFNFNGLTGTGVLTESNKKFLPFQQFGRDIADTTDAVRDPQTLEILDITPCSFGGVSVITPGTNTSNQVAVLYQGVNCTEVPVAIHADQLTPTWRVYSTGSNVFQTRAGCLIGAEYVNNSYECDIPIGAGICASYQTQTKSHRRARSVASQSIIAYTMSLGAENSVAYSNNSIAIPTNFTISVTTEILPVSMTKTSVDCTMYICGDSTECSNLLLQYGSFCTQLKRALTGIAVEQDKNTQEVFAQVKQIYKTPPIKYFGGFNFSQILPDPSKPSKRSFIEDLLFNKVTLADAGFIKQYGDCLGDIAARDLICAQKFNGLTVLPPLLTDEMIAQYTSALLAGTITSGWTFGAGAALQIPFAMQMAYRFNGIGVTQNVLYENQKLIANQFNSAIGKIQDSLSSTASALGKLQDVVNHNAQALNTLVKQLSSKFGAISSVLNDILSRLDKVEAEVQIDRLITGRLQSLQTYVTQQLIRAAEIRASANLAATKMSECVLGQSKRVDFCGKGYHLMSFPQSAPHGVVFLHVTYVPAQEKNFTTAPAICHDGKAHFPREGVFVSNGTHWFVTQRNFYEPQIITTDNTFVSGNCDVVIGIVNNTVYDPLQPELDSFKEELDKYFKNHTSPDVDLGDISGINASVVNIQKEIDRLNEVAKNLNESLIDLQELGKYEQYIKWPWYIWLGFIAGLIAIVMVTIMLCCMTSCCSCLKGCCSCGSCCKFDEDDSEPVLKGVKLHYT

SEQ ID NO: 282 - protein, 1269 aa, synthetic construct
MFVFLVLLPLVSSQCVNLITRTQSYTNSFTRGVYYPDKVFRSSVLHSTQDLFLPFFSNVTWFHAIHVSGTNGTKRFDNPALPFNDGVYFASTEKSNIIRGWIFGTTLDSKTQSLLIVNNATNVVIKVCEFQFCNDPFLDVYQKNNKSWMESEFRVYSSANNCTFEYVSQPFLMDLEGKEGNFKNLREFVFKNIDGYFKIYSKHTPINLERDLPQGFSALEPLVDLPIGINITRFQTLLALHRSYLTPGGSSSGWTAGAAAYYVGYLQPRTFLLKYNENGTITDAVDCALDPLSETKCTLKSFTVEKGIYQTSNFRVQPTESIVRFPNITNLCPFHEVFNATTFASVYAWNRKRISNCVADYSVIYNFAPFFAFKCYGVSPTKLNDLCFTNVYADSFVIRGNEVSQIAPGQTGNIADYNYKLPDDFTGCVIAWNSNKLDSKPSGNYNYLYRLFRKSKLKPFERDISTEIYQAGNKPCNGVAGPNCYSPLQSYGFRPTYGVGHQPYRVVVLSFELLHASATVCGPKKSTNLVKNKCVNFNFNGLTGTGVLTESNKKFLPFQQFGRDIADTTDAVRDPQTLEILDITPCSFGGVSVITPGTNTSNQVAVLYQGVNCTEVPVAIHADQLTPTWRVYSTGSNVFQTRAGCLIGAEYVNNSYECDIPIGAGICASYQTQTKSHQQAQSVASQSIIAYTMSLGAENSVAYSNNSIAIPTNFTISVTTEILPVSMTKTSVDCTMYICGDSTECSNLLLQYGSFCTQLKRALTGIAVEQDKNTQEVFAQVKQIYKTPPIKYFGGFNFSQILPDPSKPSKRSFIEDLLFNKVTLADAGFIKQYGDCLGDIAARDLICAQKFNGLTVLPPLLTDEMIAQYTSALLAGTITSGWTFGAGAALQIPFAMQMAYRFNGIGVTQNVLYENQKLIANQFNSAIGKIQDSLSSTASALGKLQDVVNHNAQALNTLVKQLSSKFGAISSVLNDILSRLDPPEAEVQIDRLITGRLQSLQTYVTQQLIRAAEIRASANLAATKMSECVLGQSKRVDFCGKGYHLMSFPQSAPHGVVFLHVTYVPAQEKNFTTAPAICHDGKAHFPREGVFVSNGTHWFVTQRNFYEPQIITTDNTFVSGNCDVVIGIVNNTVYDPLQPELDSFKEELDKYFKNHTSPDVDLGDISGINASVVNIQKEIDRLNEVAKNLNESLIDLQELGKYEQYIKWPWYIWLGFIAGLIAIVMVTIMLCCMTSCCSCLKGCCSCGSCCKFDEDDSEPVLKGVKLHYT

SEQ ID NO: 283 - protein, 1256 aa, synthetic construct
QCVNLITRTQSYTNSFTRGVYYPDKVFRSSVLHSTQDLFLPFFSNVTWFHAIHVSGTNGTKRFDNPALPFNDGVYFASTEKSNIIRGWIFGTTLDSKTQSLLIVNNATNVVIKVCEFQFCNDPFLDVYQKNNKSWMESEFRVYSSANNCTFEYVSQPFLMDLEGKEGNFKNLREFVFKNIDGYFKIYSKHTPINLERDLPQGFSALEPLVDLPIGINITRFQTLLALHRSYLTPGGSSSGWTAGAAAYYVGYLQPRTFLLKYNENGTITDAVDCALDPLSETKCTLKSFTVEKGIYQTSNFRVQPTESIVRFPNITNLCPFHEVFNATTFASVYAWNRKRISNCVADYSVIYNFAPFFAFKCYGVSPTKLNDLCFTNVYADSFVIRGNEVSQIAPGQTGNIADYNYKLPDDFTGCVIAWNSNKLDSKPSGNYNYLYRLFRKSKLKPFERDISTEIYQAGNKPCNGVAGPNCYSPLQSYGFRPTYGVGHQPYRVVVLSFELLHASATVCGPKKSTNLVKNKCVNFNFNGLTGTGVLTESNKKFLPFQQFGRDIADTTDAVRDPQTLEILDITPCSFGGVSVITPGTNTSNQVAVLYQGVNCTEVPVAIHADQLTPTWRVYSTGSNVFQTRAGCLIGAEYVNNSYECDIPIGAGICASYQTQTKSHRRARSVASQSIIAYTMSLGAENSVAYSNNSIAIPTNFTISVTTEILPVSMTKTSVDCTMYICGDSTECSNLLLQYGSFCTQLKRALTGIAVEQDKNTQEVFAQVKQIYKTPPIKYFGGFNFSQILPDPSKPSKRSFIEDLLFNKVTLADAGFIKQYGDCLGDIAARDLICAQKFNGLTVLPPLLTDEMIAQYTSALLAGTITSGWTFGAGAALQIPFAMQMAYRFNGIGVTQNVLYENQKLIANQFNSAIGKIQDSLSSTASALGKLQDVVNHNAQALNTLVKQLSSKFGAISSVLNDILSRLDKVEAEVQIDRLITGRLQSLQTYVTQQLIRAAEIRASANLAATKMSECVLGQSKRVDFCGKGYHLMSFPQSAPHGVVFLHVTYVPAQEKNFTTAPAICHDGKAHFPREGVFVSNGTHWFVTQRNFYEPQIITTDNTFVSGNCDVVIGIVNNTVYDPLQPELDSFKEELDKYFKNHTSPDVDLGDISGINASVVNIQKEIDRLNEVAKNLNESLIDLQELGKYEQYIKWPWYIWLGFIAGLIAIVMVTIMLCCMTSCCSCLKGCCSCGSCCKFDEDDSEPVLKGVKLHYT

SEQ ID NO: 284 - protein, 1256 aa, synthetic construct
QCVNLITRTQSYTNSFTRGVYYPDKVFRSSVLHSTQDLFLPFFSNVTWFHAIHVSGTNGTKRFDNPALPFNDGVYFASTEKSNIIRGWIFGTTLDSKTQSLLIVNNATNVVIKVCEFQFCNDPFLDVYQKNNKSWMESEFRVYSSANNCTFEYVSQPFLMDLEGKEGNFKNLREFVFKNIDGYFKIYSKHTPINLERDLPQGFSALEPLVDLPIGINITRFQTLLALHRSYLTPGGSSSGWTAGAAAYYVGYLQPRTFLLKYNENGTITDAVDCALDPLSETKCTLKSFTVEKGIYQTSNFRVQPTESIVRFPNITNLCPFHEVFNATTFASVYAWNRKRISNCVADYSVIYNFAPFFAFKCYGVSPTKLNDLCFTNVYADSFVIRGNEVSQIAPGQTGNIADYNYKLPDDFTGCVIAWNSNKLDSKPSGNYNYLYRLFRKSKLKPFERDISTEIYQAGNKPCNGVAGPNCYSPLQSYGFRPTYGVGHQPYRVVVLSFELLHASATVCGPKKSTNLVKNKCVNFNFNGLTGTGVLTESNKKFLPFQQFGRDIADTTDAVRDPQTLEILDITPCSFGGVSVITPGTNTSNQVAVLYQGVNCTEVPVAIHADQLTPTWRVYSTGSNVFQTRAGCLIGAEYVNNSYECDIPIGAGICASYQTQTKSHQQAQSVASQSIIAYTMSLGAENSVAYSNNSIAIPTNFTISVTTEILPVSMTKTSVDCTMYICGDSTECSNLLLQYGSFCTQLKRALTGIAVEQDKNTQEVFAQVKQIYKTPPIKYFGGFNFSQILPDPSKPSKRSFIEDLLFNKVTLADAGFIKQYGDCLGDIAARDLICAQKFNGLTVLPPLLTDEMIAQYTSALLAGTITSGWTFGAGAALQIPFAMQMAYRFNGIGVTQNVLYENQKLIANQFNSAIGKIQDSLSSTASALGKLQDVVNHNAQALNTLVKQLSSKFGAISSVLNDILSRLDPPEAEVQIDRLITGRLQSLQTYVTQQLIRAAEIRASANLAATKMSECVLGQSKRVDFCGKGYHLMSFPQSAPHGVVFLHVTYVPAQEKNFTTAPAICHDGKAHFPREGVFVSNGTHWFVTQRNFYEPQIITTDNTFVSGNCDVVIGIVNNTVYDPLQPELDSFKEELDKYFKNHTSPDVDLGDISGINASVVNIQKEIDRLNEVAKNLNESLIDLQELGKYEQYIKWPWYIWLGFIAGLIAIVMVTIMLCCMTSCCSCLKGCCSCGSCCKFDEDDSEPVLKGVKLHYT

SEQ ID NO: 285 - protein, 1269 aa, synthetic construct
MFVFLVLLPLVSSQCVNLITRTQSYTNSFTRGVYYPDKVFRSSVLHSTQDLFLPFFSNVTWFHAIHVSGTNGTKRFDNPALPFNDGVYFASTEKSNIIRGWIFGTTLDSKTQSLLIVNNATNVVIKVCEFQFCNDPFLDVYQKNNKSWMESEFRVYSSANNCTFEYVSQPFLMDLEGKEGNFKNLREFVFKNIDGYFKIYSKHTPINLERDLPQGFSALEPLVDLPIGINITRFQTLLALHRSYLTPGGSSSGWTAGAAAYYVGYLQPRTFLLKYNENGTITDAVDCALDPLSETKCTLKSFTVEKGIYQTSNFRVQPTESIVRFPNITNLCPFHEVFNATTFASVYAWNRKRISNCVADYSVIYNFAPFFAFKCYGVSPTKLNDLCFTNVYADSFVIRGNEVSQIAPGQTGNIADYNYKLPDDFTGCVIAWNSNKLDSTPSGNYNYLYRLFRKSKLKPFERDISTEIYQAGNKPCNGVAGPNCYSPLQSYGFRPTYGVGHQPYRVVVLSFELLHASATVCGPKKSTNLVKNKCVNFNFNGLTGTGVLTESNKKFLPFQQFGRDIADTTDAVRDPQTLEILDITPCSFGGVSVITPGTNTSNQVAVLYQGVNCTEVPVAIHADQLTPTWRVYSTGSNVFQTRAGCLIGAEYVNNSYECDIPIGAGICASYQTQTKSHRRARSVASQSIIAYTMSLGAENSVAYSNNSIAIPTNFTISVTTEILPVSMTKTSVDCTMYICGDSTECSNLLLQYGSFCTQLKRALTGIAVEQDKNTQEVFAQVKQIYKTPPIKYFGGFNFSQILPDPSKPSKRSFIEDLLFNKVTLADAGFIKQYGDCLGDIAARDLICAQKFNGLTVLPPLLTDEMIAQYTSALLAGTITSGWTFGAGAALQIPFAMQMAYRFNGIGVTQNVLYENQKLIANQFNSAIGKIQDSLSSTASALGKLQDVVNHNAQALNTLVKQLSSKFGAISSVLNDILSRLDKVEAEVQIDRLITGRLQSLQTYVTQQLIRAAEIRASANLAATKMSECVLGQSKRVDFCGKGYHLMSFPQSAPHGVVFLHVTYVPAQEKNFTTAPAICHDGKAHFPREGVFVSNGTHWFVTQRNFYEPQIITTDNTFVSGNCDVVIGIVNNTVYDPLQPELDSFKEELDKYFKNHTSPDVDLGDISGINASVVNIQKEIDRLNEVAKNLNESLIDLQELGKYEQYIKWPWYIWLGFIAGLIAIVMVTIMLCCMTSCCSCLKGCCSCGSCCKFDEDDSEPVLKGVKLHYT

SEQ ID NO: 286 - protein, 1269 aa, synthetic construct
MFVFLVLLPLVSSQCVNLITRTQSYTNSFTRGVYYPDKVFRSSVLHSTQDLFLPFFSNVTWFHAIHVSGTNGTKRFDNPALPFNDGVYFASTEKSNIIRGWIFGTTLDSKTQSLLIVNNATNVVIKVCEFQFCNDPFLDVYQKNNKSWMESEFRVYSSANNCTFEYVSQPFLMDLEGKEGNFKNLREFVFKNIDGYFKIYSKHTPINLERDLPQGFSALEPLVDLPIGINITRFQTLLALHRSYLTPGGSSSGWTAGAAAYYVGYLQPRTFLLKYNENGTITDAVDCALDPLSETKCTLKSFTVEKGIYQTSNFRVQPTESIVRFPNITNLCPFHEVFNATTFASVYAWNRKRISNCVADYSVIYNFAPFFAFKCYGVSPTKLNDLCFTNVYADSFVIRGNEVSQIAPGQTGNIADYNYKLPDDFTGCVIAWNSNKLDSTPSGNYNYLYRLFRKSKLKPFERDISTEIYQAGNKPCNGVAGPNCYSPLQSYGFRPTYGVGHQPYRVVVLSFELLHASATVCGPKKSTNLVKNKCVNFNFNGLTGTGVLTESNKKFLPFQQFGRDIADTTDAVRDPQTLEILDITPCSFGGVSVITPGTNTSNQVAVLYQGVNCTEVPVAIHADQLTPTWRVYSTGSNVFQTRAGCLIGAEYVNNSYECDIPIGAGICASYQTQTKSHQQAQSVASQSIIAYTMSLGAENSVAYSNNSIAIPTNFTISVTTEILPVSMTKTSVDCTMYICGDSTECSNLLLQYGSFCTQLKRALTGIAVEQDKNTQEVFAQVKQIYKTPPIKYFGGFNFSQILPDPSKPSKRSFIEDLLFNKVTLADAGFIKQYGDCLGDIAARDLICAQKFNGLTVLPPLLTDEMIAQYTSALLAGTITSGWTFGAGAALQIPFAMQMAYRFNGIGVTQNVLYENQKLIANQFNSAIGKIQDSLSSTASALGKLQDVVNHNAQALNTLVKQLSSKFGAISSVLNDILSRLDPPEAEVQIDRLITGRLQSLQTYVTQQLIRAAEIRASANLAATKMSECVLGQSKRVDFCGKGYHLMSFPQSAPHGVVFLHVTYVPAQEKNFTTAPAICHDGKAHFPREGVFVSNGTHWFVTQRNFYEPQIITTDNTFVSGNCDVVIGIVNNTVYDPLQPELDSFKEELDKYFKNHTSPDVDLGDISGINASVVNIQKEIDRLNEVAKNLNESLIDLQELGKYEQYIKWPWYIWLGFIAGLIAIVMVTIMLCCMTSCCSCLKGCCSCGSCCKFDEDDSEPVLKGVKLHYT

SEQ ID NO: 287 - protein, 1256 aa, synthetic construct
QCVNLITRTQSYTNSFTRGVYYPDKVFRSSVLHSTQDLFLPFFSNVTWFHAIHVSGTNGTKRFDNPALPFNDGVYFASTEKSNIIRGWIFGTTLDSKTQSLLIVNNATNVVIKVCEFQFCNDPFLDVYQKNNKSWMESEFRVYSSANNCTFEYVSQPFLMDLEGKEGNFKNLREFVFKNIDGYFKIYSKHTPINLERDLPQGFSALEPLVDLPIGINITRFQTLLALHRSYLTPGGSSSGWTAGAAAYYVGYLQPRTFLLKYNENGTITDAVDCALDPLSETKCTLKSFTVEKGIYQTSNFRVQPTESIVRFPNITNLCPFHEVFNATTFASVYAWNRKRISNCVADYSVIYNFAPFFAFKCYGVSPTKLNDLCFTNVYADSFVIRGNEVSQIAPGQTGNIADYNYKLPDDFTGCVIAWNSNKLDSTPSGNYNYLYRLFRKSKLKPFERDISTEIYQAGNKPCNGVAGPNCYSPLQSYGFRPTYGVGHQPYRVVVLSFELLHASATVCGPKKSTNLVKNKCVNFNFNGLTGTGVLTESNKKFLPFQQFGRDIADTTDAVRDPQTLEILDITPCSFGGVSVITPGTNTSNQVAVLYQGVNCTEVPVAIHADQLTPTWRVYSTGSNVFQTRAGCLIGAEYVNNSYECDIPIGAGICASYQTQTKSHRRARSVASQSIIAYTMSLGAENSVAYSNNSIAIPTNFTISVTTEILPVSMTKTSVDCTMYICGDSTECSNLLLQYGSFCTQLKRALTGIAVEQDKNTQEVFAQVKQIYKTPPIKYFGGFNFSQILPDPSKPSKRSFIEDLLFNKVTLADAGFIKQYGDCLGDIAARDLICAQKFNGLTVLPPLLTDEMIAQYTSALLAGTITSGWTFGAGAALQIPFAMQMAYRFNGIGVTQNVLYENQKLIANQFNSAIGKIQDSLSSTASALGKLQDVVNHNAQALNTLVKQLSSKFGAISSVLNDILSRLDKVEAEVQIDRLITGRLQSLQTYVTQQLIRAAEIRASANLAATKMSECVLGQSKRVDFCGKGYHLMSFPQSAPHGVVFLHVTYVPAQEKNFTTAPAICHDGKAHFPREGVFVSNGTHWFVTQRNFYEPQIITTDNTFVSGNCDVVIGIVNNTVYDPLQPELDSFKEELDKYFKNHTSPDVDLGDISGINASVVNIQKEIDRLNEVAKNLNESLIDLQELGKYEQYIKWPWYIWLGFIAGLIAIVMVTIMLCCMTSCCSCLKGCCSCGSCCKFDEDDSEPVLKGVKLHYT

SEQ ID NO: 288 - protein, 1256 aa, synthetic construct
QCVNLITRTQSYTNSFTRGVYYPDKVFRSSVLHSTQDLFLPFFSNVTWFHAIHVSGTNGTKRFDNPALPFNDGVYFASTEKSNIIRGWIFGTTLDSKTQSLLIVNNATNVVIKVCEFQFCNDPFLDVYQKNNKSWMESEFRVYSSANNCTFEYVSQPFLMDLEGKEGNFKNLREFVFKNIDGYFKIYSKHTPINLERDLPQGFSALEPLVDLPIGINITRFQTLLALHRSYLTPGGSSSGWTAGAAAYYVGYLQPRTFLLKYNENGTITDAVDCALDPLSETKCTLKSFTVEKGIYQTSNFRVQPTESIVRFPNITNLCPFHEVFNATTFASVYAWNRKRISNCVADYSVIYNFAPFFAFKCYGVSPTKLNDLCFTNVYADSFVIRGNEVSQIAPGQTGNIADYNYKLPDDFTGCVIAWNSNKLDSTPSGNYNYLYRLFRKSKLKPFERDISTEIYQAGNKPCNGVAGPNCYSPLQSYGFRPTYGVGHQPYRVVVLSFELLHASATVCGPKKSTNLVKNKCVNFNFNGLTGTGVLTESNKKFLPFQQFGRDIADTTDAVRDPQTLEILDITPCSFGGVSVITPGTNTSNQVAVLYQGVNCTEVPVAIHADQLTPTWRVYSTGSNVFQTRAGCLIGAEYVNNSYECDIPIGAGICASYQTQTKSHQQAQSVASQSIIAYTMSLGAENSVAYSNNSIAIPTNFTISVTTEILPVSMTKTSVDCTMYICGDSTECSNLLLQYGSFCTQLKRALTGIAVEQDKNTQEVFAQVKQIYKTPPIKYFGGFNFSQILPDPSKPSKRSFIEDLLFNKVTLADAGFIKQYGDCLGDIAARDLICAQKFNGLTVLPPLLTDEMIAQYTSALLAGTITSGWTFGAGAALQIPFAMQMAYRFNGIGVTQNVLYENQKLIANQFNSAIGKIQDSLSSTASALGKLQDVVNHNAQALNTLVKQLSSKFGAISSVLNDILSRLDPPEAEVQIDRLITGRLQSLQTYVTQQLIRAAEIRASANLAATKMSECVLGQSKRVDFCGKGYHLMSFPQSAPHGVVFLHVTYVPAQEKNFTTAPAICHDGKAHFPREGVFVSNGTHWFVTQRNFYEPQIITTDNTFVSGNCDVVIGIVNNTVYDPLQPELDSFKEELDKYFKNHTSPDVDLGDISGINASVVNIQKEIDRLNEVAKNLNESLIDLQELGKYEQYIKWPWYIWLGFIAGLIAIVMVTIMLCCMTSCCSCLKGCCSCGSCCKFDEDDSEPVLKGVKLHYT

SEQ ID NO: 289 - protein, 1269 aa, synthetic construct
MFVFLVLLPLVSSQCVNLITRTQSYTNSFTRGVYYPDKVFRSSVLHSTQDLFLPFFSNVTWFHAIHVSGTNGTKRFDNPALPFNDGVYFASTEKSNIIRGWIFGTTLDSKTQSLLIVNNATNVVIKVCEFQFCNDPFLDVYQKNNKSWMESEFRVYSSANNCTFEYVSQPFLMDLEGKEGNFKNLREFVFKNIDGYFKIYSKHTPINLERDLPQGFSALEPLVDLPIGINITRFQTLLALHRSYLTPGGSSSGWTAGAAAYYVGYLQPRTFLLKYNENGTITDAVDCALDPLSETKCTLKSFTVEKGIYQTSNFRVQPTESIVRFPNITNLCPFHEVFNATTFASVYAWNRKRISNCVADYSVIYNFAPFFAFKCYGVSPTKLNDLCFTNVYADSFVIRGNEVSQIAPGQTGNIADYNYKLPDDFTGCVIAWNSNKLDSKPSGNYNYLYRLFRKSKLKPFERDISTEIYQAGNKPCNGVAGSNCYSPLQSYGFRPTYGVGHQPYRVVVLSFELLHASATVCGPKKSTNLVKNKCVNFNFNGLTGTGVLTESNKKFLPFQQFGRDIADTTDAVRDPQTLEILDITPCSFGGVSVITPGTNTSNQVAVLYQGVNCTEVPVAIHADQLTPTWRVYSTGSNVFQTRAGCLIGAEYVNNSYECDIPIGAGICASYQTQTKSHRRARSVASQSIIAYTMSLGAENSVAYSNNSIAIPTNFTISVTTEILPVSMTKTSVDCTMYICGDSTECSNLLLQYGSFCTQLKRALTGIAVEQDKNTQEVFAQVKQIYKTPPIKYFGGFNFSQILPDPSKPSKRSFIEDLLFNKVTLADAGFIKQYGDCLGDIAARDLICAQKFNGLTVLPPLLTDEMIAQYTSALLAGTITSGWTFGAGAALQIPFAMQMAYRFNGIGVTQNVLYENQKLIANQFNSAIGKIQDSLSSTASALGKLQDVVNHNAQALNTLVKQLSSKFGAISSVLNDILSRLDKVEAEVQIDRLITGRLQSLQTYVTQQLIRAAEIRASANLAATKMSECVLGQSKRVDFCGKGYHLMSFPQSAPHGVVFLHVTYVPAQEKNFTTAPAICHDGKAHFPREGVFVSNGTHWFVTQRNFYEPQIITTDNTFVSGNCDVVIGIVNNTVYDPLQPELDSFKEELDKYFKNHTSPDVDLGDISGINASVVNIQKEIDRLNEVAKNLNESLIDLQELGKYEQYIKWPWYIWLGFIAGLIAIVMVTIMLCCMTSCCSCLKGCCSCGSCCKFDEDDSEPVLKGVKLHYT

SEQ ID NO: 290 - protein, 1269 aa, synthetic construct
MFVFLVLLPLVSSQCVNLITRTQSYTNSFTRGVYYPDKVFRSSVLHSTQDLFLPFFSNVTWFHAIHVSGTNGTKRFDNPALPFNDGVYFASTEKSNIIRGWIFGTTLDSKTQSLLIVNNATNVVIKVCEFQFCNDPFLDVYQKNNKSWMESEFRVYSSANNCTFEYVSQPFLMDLEGKEGNFKNLREFVFKNIDGYFKIYSKHTPINLERDLPQGFSALEPLVDLPIGINITRFQTLLALHRSYLTPGGSSSGWTAGAAAYYVGYLQPRTFLLKYNENGTITDAVDCALDPLSETKCTLKSFTVEKGIYQTSNFRVQPTESIVRFPNITNLCPFHEVFNATTFASVYAWNRKRISNCVADYSVIYNFAPFFAFKCYGVSPTKLNDLCFTNVYADSFVIRGNEVSQIAPGQTGNIADYNYKLPDDFTGCVIAWNSNKLDSKPSGNYNYLYRLFRKSKLKPFERDISTEIYQAGNKPCNGVAGSNCYSPLQSYGFRPTYGVGHQPYRVVVLSFELLHASATVCGPKKSTNLVKNKCVNFNFNGLTGTGVLTESNKKFLPFQQFGRDIADTTDAVRDPQTLEILDITPCSFGGVSVITPGTNTSNQVAVLYQGVNCTEVPVAIHADQLTPTWRVYSTGSNVFQTRAGCLIGAEYVNNSYECDIPIGAGICASYQTQTKSHQQAQSVASQSIIAYTMSLGAENSVAYSNNSIAIPTNFTISVTTEILPVSMTKTSVDCTMYICGDSTECSNLLLQYGSFCTQLKRALTGIAVEQDKNTQEVFAQVKQIYKTPPIKYFGGFNFSQILPDPSKPSKRSFIEDLLFNKVTLADAGFIKQYGDCLGDIAARDLICAQKFNGLTVLPPLLTDEMIAQYTSALLAGTITSGWTFGAGAALQIPFAMQMAYRFNGIGVTQNVLYENQKLIANQFNSAIGKIQDSLSSTASALGKLQDVVNHNAQALNTLVKQLSSKFGAISSVLNDILSRLDPPEAEVQIDRLITGRLQSLQTYVTQQLIRAAEIRASANLAATKMSECVLGQSKRVDFCGKGYHLMSFPQSAPHGVVFLHVTYVPAQEKNFTTAPAICHDGKAHFPREGVFVSNGTHWFVTQRNFYEPQIITTDNTFVSGNCDVVIGIVNNTVYDPLQPELDSFKEELDKYFKNHTSPDVDLGDISGINASVVNIQKEIDRLNEVAKNLNESLIDLQELGKYEQYIKWPWYIWLGFIAGLIAIVMVTIMLCCMTSCCSCLKGCCSCGSCCKFDEDDSEPVLKGVKLHYT

SEQ ID NO: 291 - protein, 1256 aa, synthetic construct
QCVNLITRTQSYTNSFTRGVYYPDKVFRSSVLHSTQDLFLPFFSNVTWFHAIHVSGTNGTKRFDNPALPFNDGVYFASTEKSNIIRGWIFGTTLDSKTQSLLIVNNATNVVIKVCEFQFCNDPFLDVYQKNNKSWMESEFRVYSSANNCTFEYVSQPFLMDLEGKEGNFKNLREFVFKNIDGYFKIYSKHTPINLERDLPQGFSALEPLVDLPIGINITRFQTLLALHRSYLTPGGSSSGWTAGAAAYYVGYLQPRTFLLKYNENGTITDAVDCALDPLSETKCTLKSFTVEKGIYQTSNFRVQPTESIVRFPNITNLCPFHEVFNATTFASVYAWNRKRISNCVADYSVIYNFAPFFAFKCYGVSPTKLNDLCFTNVYADSFVIRGNEVSQIAPGQTGNIADYNYKLPDDFTGCVIAWNSNKLDSKPSGNYNYLYRLFRKSKLKPFERDISTEIYQAGNKPCNGVAGSNCYSPLQSYGFRPTYGVGHQPYRVVVLSFELLHASATVCGPKKSTNLVKNKCVNFNFNGLTGTGVLTESNKKFLPFQQFGRDIADTTDAVRDPQTLEILDITPCSFGGVSVITPGTNTSNQVAVLYQGVNCTEVPVAIHADQLTPTWRVYSTGSNVFQTRAGCLIGAEYVNNSYECDIPIGAGICASYQTQTKSHRRARSVASQSIIAYTMSLGAENSVAYSNNSIAIPTNFTISVTTEILPVSMTKTSVDCTMYICGDSTECSNLLLQYGSFCTQLKRALTGIAVEQDKNTQEVFAQVKQIYKTPPIKYFGGFNFSQILPDPSKPSKRSFIEDLLFNKVTLADAGFIKQYGDCLGDIAARDLICAQKFNGLTVLPPLLTDEMIAQYTSALLAGTITSGWTFGAGAALQIPFAMQMAYRFNGIGVTQNVLYENQKLIANQFNSAIGKIQDSLSSTASALGKLQDVVNHNAQALNTLVKQLSSKFGAISSVLNDILSRLDKVEAEVQIDRLITGRLQSLQTYVTQQLIRAAEIRASANLAATKMSECVLGQSKRVDFCGKGYHLMSFPQSAPHGVVFLHVTYVPAQEKNFTTAPAICHDGKAHFPREGVFVSNGTHWFVTQRNFYEPQIITTDNTFVSGNCDVVIGIVNNTVYDPLQPELDSFKEELDKYFKNHTSPDVDLGDISGINASVVNIQKEIDRLNEVAKNLNESLIDLQELGKYEQYIKWPWYIWLGFIAGLIAIVMVTIMLCCMTSCCSCLKGCCSCGSCCKFDEDDSEPVLKGVKLHYT

SEQ ID NO: 292 - protein, 1256 aa, synthetic construct
QCVNLITRTQSYTNSFTRGVYYPDKVFRSSVLHSTQDLFLPFFSNVTWFHAIHVSGTNGTKRFDNPALPFNDGVYFASTEKSNIIRGWIFGTTLDSKTQSLLIVNNATNVVIKVCEFQFCNDPFLDVYQKNNKSWMESEFRVYSSANNCTFEYVSQPFLMDLEGKEGNFKNLREFVFKNIDGYFKIYSKHTPINLERDLPQGFSALEPLVDLPIGINITRFQTLLALHRSYLTPGGSSSGWTAGAAAYYVGYLQPRTFLLKYNENGTITDAVDCALDPLSETKCTLKSFTVEKGIYQTSNFRVQPTESIVRFPNITNLCPFHEVFNATTFASVYAWNRKRISNCVADYSVIYNFAPFFAFKCYGVSPTKLNDLCFTNVYADSFVIRGNEVSQIAPGQTGNIADYNYKLPDDFTGCVIAWNSNKLDSKPSGNYNYLYRLFRKSKLKPFERDISTEIYQAGNKPCNGVAGSNCYSPLQSYGFRPTYGVGHQPYRVVVLSFELLHASATVCGPKKSTNLVKNKCVNFNFNGLTGTGVLTESNKKFLPFQQFGRDIADTTDAVRDPQTLEILDITPCSFGGVSVITPGTNTSNQVAVLYQGVNCTEVPVAIHADQLTPTWRVYSTGSNVFQTRAGCLIGAEYVNNSYECDIPIGAGICASYQTQTKSHQQAQSVASQSIIAYTMSLGAENSVAYSNNSIAIPTNFTISVTTEILPVSMTKTSVDCTMYICGDSTECSNLLLQYGSFCTQLKRALTGIAVEQDKNTQEVFAQVKQIYKTPPIKYFGGFNFSQILPDPSKPSKRSFIEDLLFNKVTLADAGFIKQYGDCLGDIAARDLICAQKFNGLTVLPPLLTDEMIAQYTSALLAGTITSGWTFGAGAALQIPFAMQMAYRFNGIGVTQNVLYENQKLIANQFNSAIGKIQDSLSSTASALGKLQDVVNHNAQALNTLVKQLSSKFGAISSVLNDILSRLDPPEAEVQIDRLITGRLQSLQTYVTQQLIRAAEIRASANLAATKMSECVLGQSKRVDFCGKGYHLMSFPQSAPHGVVFLHVTYVPAQEKNFTTAPAICHDGKAHFPREGVFVSNGTHWFVTQRNFYEPQIITTDNTFVSGNCDVVIGIVNNTVYDPLQPELDSFKEELDKYFKNHTSPDVDLGDISGINASVVNIQKEIDRLNEVAKNLNESLIDLQELGKYEQYIKWPWYIWLGFIAGLIAIVMVTIMLCCMTSCCSCLKGCCSCGSCCKFDEDDSEPVLKGVKLHYT

SEQ ID NO: 293 - protein, 1269 aa, Severe acute respiratory syndrome-related coronavirus
MFVFLVLLPLVSSQCVNLITRTQSYTNSFTRGVYYPDKVFRSSVLHSTHDLFLPFFSNVTWFHAIHVSGTNGTKRFDNPALPFNDGVYFASTEKSNIIRGWIFGTTLDSKTQSLLIVNNATNVVIKVCEFQFCNDPFLDVYQKNNKSWMESEFRVYSSANNCTFEYVSQPFLMDLEGKEGNFKNLREFVFKNIDGYFKIYSKHTPINLERDLPQGFSALEPLVDLPIGINITRFQTLLALHRSYLTPVDSSSGWTAGAAAYYVGYLQPRTFLLKYNENGTITDAVDCALDPLSETKCTLKSFTVEKGIYQTSNFRVQPTESIVRFPNITNLCPFHEVFNATTFASVYAWNRKRISNCVADYSVIYNFAPFFAFKCYGVSPTKLNDLCFTNVYADSFVIRGNEVSQIAPGQTGNIADYNYKLPDDFTGCVIAWNSNKLDSKPSGNYNYLYRLLRKSKLKPFERDISTEIYQAGNKPCNGVAGPNCYSPLQSYGFRPTYGVGHQPYRVVVLSFELLHAPATVCGPKKSTNLVKNKCVNFNFNGLTGTGVLTESNKKFLPFQQFGRDIADTTDAVRDPQTLEILDITPCSFGGVSVITPGTNTSNQVAVLYQGVNCTEVPVAIHADQLTPTWRVYSTGSNVFQTRAGCLIGAEYVNNSYECDIPIGAGICASYQTQTKSHRRARSVASQSIIAYTMSLGAENSVAYSNNSIAIPTNFTISVTTEILPVSMTKTSVDCTMYICGDSTECSNLLLQYGSFCTQLKRALTGIAVEQDKNTQEVFAQVKQIYKTPPIKYFGGFNFSQILPDPSKPSKRSFIEDLLFNKVTLADAGFIKQYGDCLGDIAARDLICAQKFNGLTVLPPLLTDEMIAQYTSALLAGTITSGWTFGAGAALQIPFAMQMAYRFNGIGVTQNVLYENQKLIANQFNSAIGKIQDSLSSTASALGKLQDVVNHNAQALNTLVKQLSSKFGAISSVLNDILSRLDKVEAEVQIDRLITGRLQSLQTYVTQQLIRAAEIRASANLAATKMSECVLGQSKRVDFCGKGYHLMSFPQSAPHGVVFLHVTYVPAQEKNFTTAPAICHDGKAHFPREGVFVSNGTHWFVTQRNFYEPQIITTDNTFVSGNCDVVIGIVNNTVYDPLQPELDSFKEELDKYFKNHTSPDVDLGDISGINASVVNIQKEIDRLNEVAKNLNESLIDLQELGKYEQYIKWPWYIWLGFIAGLIAIVMVTIMLCCMTSCCSCLKGCCSCGSCCKFDEDDSEPVLKGVKLHYT

SEQ ID NO: 294 - protein, 1256 aa, Severe acute respiratory syndrome-related coronavirus
QCVNLITRTQSYTNSFTRGVYYPDKVFRSSVLHSTHDLFLPFFSNVTWFHAIHVSGTNGTKRFDNPALPFNDGVYFASTEKSNIIRGWIFGTTLDSKTQSLLIVNNATNVVIKVCEFQFCNDPFLDVYQKNNKSWMESEFRVYSSANNCTFEYVSQPFLMDLEGKEGNFKNLREFVFKNIDGYFKIYSKHTPINLERDLPQGFSALEPLVDLPIGINITRFQTLLALHRSYLTPVDSSSGWTAGAAAYYVGYLQPRTFLLKYNENGTITDAVDCALDPLSETKCTLKSFTVEKGIYQTSNFRVQPTESIVRFPNITNLCPFHEVFNATTFASVYAWNRKRISNCVADYSVIYNFAPFFAFKCYGVSPTKLNDLCFTNVYADSFVIRGNEVSQIAPGQTGNIADYNYKLPDDFTGCVIAWNSNKLDSKPSGNYNYLYRLLRKSKLKPFERDISTEIYQAGNKPCNGVAGPNCYSPLQSYGFRPTYGVGHQPYRVVVLSFELLHAPATVCGPKKSTNLVKNKCVNFNFNGLTGTGVLTESNKKFLPFQQFGRDIADTTDAVRDPQTLEILDITPCSFGGVSVITPGTNTSNQVAVLYQGVNCTEVPVAIHADQLTPTWRVYSTGSNVFQTRAGCLIGAEYVNNSYECDIPIGAGICASYQTQTKSHRRARSVASQSIIAYTMSLGAENSVAYSNNSIAIPTNFTISVTTEILPVSMTKTSVDCTMYICGDSTECSNLLLQYGSFCTQLKRALTGIAVEQDKNTQEVFAQVKQIYKTPPIKYFGGFNFSQILPDPSKPSKRSFIEDLLFNKVTLADAGFIKQYGDCLGDIAARDLICAQKFNGLTVLPPLLTDEMIAQYTSALLAGTITSGWTFGAGAALQIPFAMQMAYRFNGIGVTQNVLYENQKLIANQFNSAIGKIQDSLSSTASALGKLQDVVNHNAQALNTLVKQLSSKFGAISSVLNDILSRLDKVEAEVQIDRLITGRLQSLQTYVTQQLIRAAEIRASANLAATKMSECVLGQSKRVDFCGKGYHLMSFPQSAPHGVVFLHVTYVPAQEKNFTTAPAICHDGKAHFPREGVFVSNGTHWFVTQRNFYEPQIITTDNTFVSGNCDVVIGIVNNTVYDPLQPELDSFKEELDKYFKNHTSPDVDLGDISGINASVVNIQKEIDRLNEVAKNLNESLIDLQELGKYEQYIKWPWYIWLGFIAGLIAIVMVTIMLCCMTSCCSCLKGCCSCGSCCKFDEDDSEPVLKGVKLHYT

SEQ ID NO: 295 - protein, 1269 aa, synthetic construct
MFVFLVLLPLVSSQCVNLITRTQSYTNSFTRGVYYPDKVFRSSVLHSTHDLFLPFFSNVTWFHAIHVSGTNGTKRFDNPALPFNDGVYFASTEKSNIIRGWIFGTTLDSKTQSLLIVNNATNVVIKVCEFQFCNDPFLDVYQKNNKSWMESEFRVYSSANNCTFEYVSQPFLMDLEGKEGNFKNLREFVFKNIDGYFKIYSKHTPINLERDLPQGFSALEPLVDLPIGINITRFQTLLALHRSYLTPVDSSSGWTAGAAAYYVGYLQPRTFLLKYNENGTITDAVDCALDPLSETKCTLKSFTVEKGIYQTSNFRVQPTESIVRFPNITNLCPFHEVFNATTFASVYAWNRKRISNCVADYSVIYNFAPFFAFKCYGVSPTKLNDLCFTNVYADSFVIRGNEVSQIAPGQTGNIADYNYKLPDDFTGCVIAWNSNKLDSKPSGNYNYLYRLLRKSKLKPFERDISTEIYQAGNKPCNGVAGPNCYSPLQSYGFRPTYGVGHQPYRVVVLSFELLHAPATVCGPKKSTNLVKNKCVNFNFNGLTGTGVLTESNKKFLPFQQFGRDIADTTDAVRDPQTLEILDITPCSFGGVSVITPGTNTSNQVAVLYQGVNCTEVPVAIHADQLTPTWRVYSTGSNVFQTRAGCLIGAEYVNNSYECDIPIGAGICASYQTQTKSHQQAQSVASQSIIAYTMSLGAENSVAYSNNSIAIPTNFTISVTTEILPVSMTKTSVDCTMYICGDSTECSNLLLQYGSFCTQLKRALTGIAVEQDKNTQEVFAQVKQIYKTPPIKYFGGFNFSQILPDPSKPSKRSFIEDLLFNKVTLADAGFIKQYGDCLGDIAARDLICAQKFNGLTVLPPLLTDEMIAQYTSALLAGTITSGWTFGAGAALQIPFAMQMAYRFNGIGVTQNVLYENQKLIANQFNSAIGKIQDSLSSTASALGKLQDVVNHNAQALNTLVKQLSSKFGAISSVLNDILSRLDPPEAEVQIDRLITGRLQSLQTYVTQQLIRAAEIRASANLAATKMSECVLGQSKRVDFCGKGYHLMSFPQSAPHGVVFLHVTYVPAQEKNFTTAPAICHDGKAHFPREGVFVSNGTHWFVTQRNFYEPQIITTDNTFVSGNCDVVIGIVNNTVYDPLQPELDSFKEELDKYFKNHTSPDVDLGDISGINASVVNIQKEIDRLNEVAKNLNESLIDLQELGKYEQYIKWPWYIWLGFIAGLIAIVMVTIMLCCMTSCCSCLKGCCSCGSCCKFDEDDSEPVLKGVKLHYT

SEQ ID NO: 296 - protein, 1256 aa, synthetic construct
QCVNLITRTQSYTNSFTRGVYYPDKVFRSSVLHSTHDLFLPFFSNVTWFHAIHVSGTNGTKRFDNPALPFNDGVYFASTEKSNIIRGWIFGTTLDSKTQSLLIVNNATNVVIKVCEFQFCNDPFLDVYQKNNKSWMESEFRVYSSANNCTFEYVSQPFLMDLEGKEGNFKNLREFVFKNIDGYFKIYSKHTPINLERDLPQGFSALEPLVDLPIGINITRFQTLLALHRSYLTPVDSSSGWTAGAAAYYVGYLQPRTFLLKYNENGTITDAVDCALDPLSETKCTLKSFTVEKGIYQTSNFRVQPTESIVRFPNITNLCPFHEVFNATTFASVYAWNRKRISNCVADYSVIYNFAPFFAFKCYGVSPTKLNDLCFTNVYADSFVIRGNEVSQIAPGQTGNIADYNYKLPDDFTGCVIAWNSNKLDSKPSGNYNYLYRLLRKSKLKPFERDISTEIYQAGNKPCNGVAGPNCYSPLQSYGFRPTYGVGHQPYRVVVLSFELLHAPATVCGPKKSTNLVKNKCVNFNFNGLTGTGVLTESNKKFLPFQQFGRDIADTTDAVRDPQTLEILDITPCSFGGVSVITPGTNTSNQVAVLYQGVNCTEVPVAIHADQLTPTWRVYSTGSNVFQTRAGCLIGAEYVNNSYECDIPIGAGICASYQTQTKSHQQAQSVASQSIIAYTMSLGAENSVAYSNNSIAIPTNFTISVTTEILPVSMTKTSVDCTMYICGDSTECSNLLLQYGSFCTQLKRALTGIAVEQDKNTQEVFAQVKQIYKTPPIKYFGGFNFSQILPDPSKPSKRSFIEDLLFNKVTLADAGFIKQYGDCLGDIAARDLICAQKFNGLTVLPPLLTDEMIAQYTSALLAGTITSGWTFGAGAALQIPFAMQMAYRFNGIGVTQNVLYENQKLIANQFNSAIGKIQDSLSSTASALGKLQDVVNHNAQALNTLVKQLSSKFGAISSVLNDILSRLDPPEAEVQIDRLITGRLQSLQTYVTQQLIRAAEIRASANLAATKMSECVLGQSKRVDFCGKGYHLMSFPQSAPHGVVFLHVTYVPAQEKNFTTAPAICHDGKAHFPREGVFVSNGTHWFVTQRNFYEPQIITTDNTFVSGNCDVVIGIVNNTVYDPLQPELDSFKEELDKYFKNHTSPDVDLGDISGINASVVNIQKEIDRLNEVAKNLNESLIDLQELGKYEQYIKWPWYIWLGFIAGLIAIVMVTIMLCCMTSCCSCLKGCCSCGSCCKFDEDDSEPVLKGVKLHYT

SEQ ID NO: 297 - protein, 1269 aa, synthetic construct
MFVFLVLLPLVSSQCVNLITRTQSYTNSFTRGVYYPDKVFRSSVLHSTHDLFLPFFSNVTWFHAIHVSGTNGTKRFDNPALPFNDGVYFASTEKSNIIRGWIFGTTLDSKTQSLLIVNNATNVVIKVCEFQFCNDPFLDVYQKNNKSWMESEFRVYSSANNCTFEYVSQPFLMDLEGKEGNFKNLREFVFKNIDGYFKIYSKHTPINLERDLPQGFSALEPLVDLPIGINITRFQTLLALHRSYLTPVDSSSGWTAGAAAYYVGYLQPRTFLLKYNENGTITDAVDCALDPLSETKCTLKSFTVEKGIYQTSNFRVQPTESIVRFPNITNLCPFHEVFNATTFASVYAWNRKRISNCVADYSVIYNFAPFFAFKCYGVSPTKLNDLCFTNVYADSFVIRGNEVSQIAPGQTGNIADYNYKLPDDFTGCVIAWNSNKLDSKPSGNYNYLYRLLRKSKLKPFERDISTEIYQAGNKPCNGVAGPNCYSPLQSYGFRPTYGVGHQPYRVVVLSFELLHASATVCGPKKSTNLVKNKCVNFNFNGLTGTGVLTESNKKFLPFQQFGRDIADTTDAVRDPQTLEILDITPCSFGGVSVITPGTNTSNQVAVLYQGVNCTEVPVAIHADQLTPTWRVYSTGSNVFQTRAGCLIGAEYVNNSYECDIPIGAGICASYQTQTKSHRRARSVASQSIIAYTMSLGAENSVAYSNNSIAIPTNFTISVTTEILPVSMTKTSVDCTMYICGDSTECSNLLLQYGSFCTQLKRALTGIAVEQDKNTQEVFAQVKQIYKTPPIKYFGGFNFSQILPDPSKPSKRSFIEDLLFNKVTLADAGFIKQYGDCLGDIAARDLICAQKFNGLTVLPPLLTDEMIAQYTSALLAGTITSGWTFGAGAALQIPFAMQMAYRFNGIGVTQNVLYENQKLIANQFNSAIGKIQDSLSSTASALGKLQDVVNHNAQALNTLVKQLSSKFGAISSVLNDILSRLDKVEAEVQIDRLITGRLQSLQTYVTQQLIRAAEIRASANLAATKMSECVLGQSKRVDFCGKGYHLMSFPQSAPHGVVFLHVTYVPAQEKNFTTAPAICHDGKAHFPREGVFVSNGTHWFVTQRNFYEPQIITTDNTFVSGNCDVVIGIVNNTVYDPLQPELDSFKEELDKYFKNHTSPDVDLGDISGINASVVNIQKEIDRLNEVAKNLNESLIDLQELGKYEQYIKWPWYIWLGFIAGLIAIVMVTIMLCCMTSCCSCLKGCCSCGSCCKFDEDDSEPVLKGVKLHYT

SEQ ID NO: 298 - protein, 1256 aa, synthetic construct
QCVNLITRTQSYTNSFTRGVYYPDKVFRSSVLHSTHDLFLPFFSNVTWFHAIHVSGTNGTKRFDNPALPFNDGVYFASTEKSNIIRGWIFGTTLDSKTQSLLIVNNATNVVIKVCEFQFCNDPFLDVYQKNNKSWMESEFRVYSSANNCTFEYVSQPFLMDLEGKEGNFKNLREFVFKNIDGYFKIYSKHTPINLERDLPQGFSALEPLVDLPIGINITRFQTLLALHRSYLTPVDSSSGWTAGAAAYYVGYLQPRTFLLKYNENGTITDAVDCALDPLSETKCTLKSFTVEKGIYQTSNFRVQPTESIVRFPNITNLCPFHEVFNATTFASVYAWNRKRISNCVADYSVIYNFAPFFAFKCYGVSPTKLNDLCFTNVYADSFVIRGNEVSQIAPGQTGNIADYNYKLPDDFTGCVIAWNSNKLDSKPSGNYNYLYRLLRKSKLKPFERDISTEIYQAGNKPCNGVAGPNCYSPLQSYGFRPTYGVGHQPYRVVVLSFELLHASATVCGPKKSTNLVKNKCVNFNFNGLTGTGVLTESNKKFLPFQQFGRDIADTTDAVRDPQTLEILDITPCSFGGVSVITPGTNTSNQVAVLYQGVNCTEVPVAIHADQLTPTWRVYSTGSNVFQTRAGCLIGAEYVNNSYECDIPIGAGICASYQTQTKSHRRARSVASQSIIAYTMSLGAENSVAYSNNSIAIPTNFTISVTTEILPVSMTKTSVDCTMYICGDSTECSNLLLQYGSFCTQLKRALTGIAVEQDKNTQEVFAQVKQIYKTPPIKYFGGFNFSQILPDPSKPSKRSFIEDLLFNKVTLADAGFIKQYGDCLGDIAARDLICAQKFNGLTVLPPLLTDEMIAQYTSALLAGTITSGWTFGAGAALQIPFAMQMAYRFNGIGVTQNVLYENQKLIANQFNSAIGKIQDSLSSTASALGKLQDVVNHNAQALNTLVKQLSSKFGAISSVLNDILSRLDKVEAEVQIDRLITGRLQSLQTYVTQQLIRAAEIRASANLAATKMSECVLGQSKRVDFCGKGYHLMSFPQSAPHGVVFLHVTYVPAQEKNFTTAPAICHDGKAHFPREGVFVSNGTHWFVTQRNFYEPQIITTDNTFVSGNCDVVIGIVNNTVYDPLQPELDSFKEELDKYFKNHTSPDVDLGDISGINASVVNIQKEIDRLNEVAKNLNESLIDLQELGKYEQYIKWPWYIWLGFIAGLIAIVMVTIMLCCMTSCCSCLKGCCSCGSCCKFDEDDSEPVLKGVKLHYT

SEQ ID NO: 299 - protein, 1269 aa, synthetic construct
MFVFLVLLPLVSSQCVNLITRTQSYTNSFTRGVYYPDKVFRSSVLHSTHDLFLPFFSNVTWFHAIHVSGTNGTKRFDNPALPFNDGVYFASTEKSNIIRGWIFGTTLDSKTQSLLIVNNATNVVIKVCEFQFCNDPFLDVYQKNNKSWMESEFRVYSSANNCTFEYVSQPFLMDLEGKEGNFKNLREFVFKNIDGYFKIYSKHTPINLERDLPQGFSALEPLVDLPIGINITRFQTLLALHRSYLTPVDSSSGWTAGAAAYYVGYLQPRTFLLKYNENGTITDAVDCALDPLSETKCTLKSFTVEKGIYQTSNFRVQPTESIVRFPNITNLCPFHEVFNATTFASVYAWNRKRISNCVADYSVIYNFAPFFAFKCYGVSPTKLNDLCFTNVYADSFVIRGNEVSQIAPGQTGNIADYNYKLPDDFTGCVIAWNSNKLDSKPSGNYNYLYRLLRKSKLKPFERDISTEIYQAGNKPCNGVAGPNCYSPLQSYGFRPTYGVGHQPYRVVVLSFELLHASATVCGPKKSTNLVKNKCVNFNFNGLTGTGVLTESNKKFLPFQQFGRDIADTTDAVRDPQTLEILDITPCSFGGVSVITPGTNTSNQVAVLYQGVNCTEVPVAIHADQLTPTWRVYSTGSNVFQTRAGCLIGAEYVNNSYECDIPIGAGICASYQTQTKSHQQAQSVASQSIIAYTMSLGAENSVAYSNNSIAIPTNFTISVTTEILPVSMTKTSVDCTMYICGDSTECSNLLLQYGSFCTQLKRALTGIAVEQDKNTQEVFAQVKQIYKTPPIKYFGGFNFSQILPDPSKPSKRSFIEDLLFNKVTLADAGFIKQYGDCLGDIAARDLICAQKFNGLTVLPPLLTDEMIAQYTSALLAGTITSGWTFGAGAALQIPFAMQMAYRFNGIGVTQNVLYENQKLIANQFNSAIGKIQDSLSSTASALGKLQDVVNHNAQALNTLVKQLSSKFGAISSVLNDILSRLDPPEAEVQIDRLITGRLQSLQTYVTQQLIRAAEIRASANLAATKMSECVLGQSKRVDFCGKGYHLMSFPQSAPHGVVFLHVTYVPAQEKNFTTAPAICHDGKAHFPREGVFVSNGTHWFVTQRNFYEPQIITTDNTFVSGNCDVVIGIVNNTVYDPLQPELDSFKEELDKYFKNHTSPDVDLGDISGINASVVNIQKEIDRLNEVAKNLNESLIDLQELGKYEQYIKWPWYIWLGFIAGLIAIVMVTIMLCCMTSCCSCLKGCCSCGSCCKFDEDDSEPVLKGVKLHYT

SEQ ID NO: 300 - protein, 1256 aa, synthetic construct
QCVNLITRTQSYTNSFTRGVYYPDKVFRSSVLHSTHDLFLPFFSNVTWFHAIHVSGTNGTKRFDNPALPFNDGVYFASTEKSNIIRGWIFGTTLDSKTQSLLIVNNATNVVIKVCEFQFCNDPFLDVYQKNNKSWMESEFRVYSSANNCTFEYVSQPFLMDLEGKEGNFKNLREFVFKNIDGYFKIYSKHTPINLERDLPQGFSALEPLVDLPIGINITRFQTLLALHRSYLTPVDSSSGWTAGAAAYYVGYLQPRTFLLKYNENGTITDAVDCALDPLSETKCTLKSFTVEKGIYQTSNFRVQPTESIVRFPNITNLCPFHEVFNATTFASVYAWNRKRISNCVADYSVIYNFAPFFAFKCYGVSPTKLNDLCFTNVYADSFVIRGNEVSQIAPGQTGNIADYNYKLPDDFTGCVIAWNSNKLDSKPSGNYNYLYRLLRKSKLKPFERDISTEIYQAGNKPCNGVAGPNCYSPLQSYGFRPTYGVGHQPYRVVVLSFELLHASATVCGPKKSTNLVKNKCVNFNFNGLTGTGVLTESNKKFLPFQQFGRDIADTTDAVRDPQTLEILDITPCSFGGVSVITPGTNTSNQVAVLYQGVNCTEVPVAIHADQLTPTWRVYSTGSNVFQTRAGCLIGAEYVNNSYECDIPIGAGICASYQTQTKSHQQAQSVASQSIIAYTMSLGAENSVAYSNNSIAIPTNFTISVTTEILPVSMTKTSVDCTMYICGDSTECSNLLLQYGSFCTQLKRALTGIAVEQDKNTQEVFAQVKQIYKTPPIKYFGGFNFSQILPDPSKPSKRSFIEDLLFNKVTLADAGFIKQYGDCLGDIAARDLICAQKFNGLTVLPPLLTDEMIAQYTSALLAGTITSGWTFGAGAALQIPFAMQMAYRFNGIGVTQNVLYENQKLIANQFNSAIGKIQDSLSSTASALGKLQDVVNHNAQALNTLVKQLSSKFGAISSVLNDILSRLDPPEAEVQIDRLITGRLQSLQTYVTQQLIRAAEIRASANLAATKMSECVLGQSKRVDFCGKGYHLMSFPQSAPHGVVFLHVTYVPAQEKNFTTAPAICHDGKAHFPREGVFVSNGTHWFVTQRNFYEPQIITTDNTFVSGNCDVVIGIVNNTVYDPLQPELDSFKEELDKYFKNHTSPDVDLGDISGINASVVNIQKEIDRLNEVAKNLNESLIDLQELGKYEQYIKWPWYIWLGFIAGLIAIVMVTIMLCCMTSCCSCLKGCCSCGSCCKFDEDDSEPVLKGVKLHYT

SEQ ID NO: 301 - protein, 1269 aa, synthetic construct
MFVFLVLLPLVSSQCVNLITRTQSYTNSFTRGVYYPDKVFRSSVLHSTHDLFLPFFSNVTWFHAIHVSGTNGTKRFDNPALPFNDGVYFASTEKSNIIRGWIFGTTLDSKTQSLLIVNNATNVVIKVCEFQFCNDPFLDVYQKNNKSWMESEFRVYSSANNCTFEYVSQPFLMDLEGKEGNFKNLREFVFKNIDGYFKIYSKHTPINLERDLPQGFSALEPLVDLPIGINITRFQTLLALHRSYLTPVDSSSGWTAGAAAYYVGYLQPRTFLLKYNENGTITDAVDCALDPLSETKCTLKSFTVEKGIYQTSNFRVQPTESIVRFPNITNLCPFHEVFNATTFASVYAWNRKRISNCVADYSVIYNFAPFFAFKCYGVSPTKLNDLCFTNVYADSFVIRGNEVSQIAPGQTGNIADYNYKLPDDFTGCVIAWNSNKLDSTPSGNYNYLYRLLRKSKLKPFERDISTEIYQAGNKPCNGVAGPNCYSPLQSYGFRPTYGVGHQPYRVVVLSFELLHAPATVCGPKKSTNLVKNKCVNFNFNGLTGTGVLTESNKKFLPFQQFGRDIADTTDAVRDPQTLEILDITPCSFGGVSVITPGTNTSNQVAVLYQGVNCTEVPVAIHADQLTPTWRVYSTGSNVFQTRAGCLIGAEYVNNSYECDIPIGAGICASYQTQTKSHRRARSVASQSIIAYTMSLGAENSVAYSNNSIAIPTNFTISVTTEILPVSMTKTSVDCTMYICGDSTECSNLLLQYGSFCTQLKRALTGIAVEQDKNTQEVFAQVKQIYKTPPIKYFGGFNFSQILPDPSKPSKRSFIEDLLFNKVTLADAGFIKQYGDCLGDIAARDLICAQKFNGLTVLPPLLTDEMIAQYTSALLAGTITSGWTFGAGAALQIPFAMQMAYRFNGIGVTQNVLYENQKLIANQFNSAIGKIQDSLSSTASALGKLQDVVNHNAQALNTLVKQLSSKFGAISSVLNDILSRLDKVEAEVQIDRLITGRLQSLQTYVTQQLIRAAEIRASANLAATKMSECVLGQSKRVDFCGKGYHLMSFPQSAPHGVVFLHVTYVPAQEKNFTTAPAICHDGKAHFPREGVFVSNGTHWFVTQRNFYEPQIITTDNTFVSGNCDVVIGIVNNTVYDPLQPELDSFKEELDKYFKNHTSPDVDLGDISGINASVVNIQKEIDRLNEVAKNLNESLIDLQELGKYEQYIKWPWYIWLGFIAGLIAIVMVTIMLCCMTSCCSCLKGCCSCGSCCKFDEDDSEPVLKGVKLHYT

SEQ ID NO: 302 - protein, 1256 aa, synthetic construct
QCVNLITRTQSYTNSFTRGVYYPDKVFRSSVLHSTHDLFLPFFSNVTWFHAIHVSGTNGTKRFDNPALPFNDGVYFASTEKSNIIRGWIFGTTLDSKTQSLLIVNNATNVVIKVCEFQFCNDPFLDVYQKNNKSWMESEFRVYSSANNCTFEYVSQPFLMDLEGKEGNFKNLREFVFKNIDGYFKIYSKHTPINLERDLPQGFSALEPLVDLPIGINITRFQTLLALHRSYLTPVDSSSGWTAGAAAYYVGYLQPRTFLLKYNENGTITDAVDCALDPLSETKCTLKSFTVEKGIYQTSNFRVQPTESIVRFPNITNLCPFHEVFNATTFASVYAWNRKRISNCVADYSVIYNFAPFFAFKCYGVSPTKLNDLCFTNVYADSFVIRGNEVSQIAPGQTGNIADYNYKLPDDFTGCVIAWNSNKLDSTPSGNYNYLYRLLRKSKLKPFERDISTEIYQAGNKPCNGVAGPNCYSPLQSYGFRPTYGVGHQPYRVVVLSFELLHAPATVCGPKKSTNLVKNKCVNFNFNGLTGTGVLTESNKKFLPFQQFGRDIADTTDAVRDPQTLEILDITPCSFGGVSVITPGTNTSNQVAVLYQGVNCTEVPVAIHADQLTPTWRVYSTGSNVFQTRAGCLIGAEYVNNSYECDIPIGAGICASYQTQTKSHRRARSVASQSIIAYTMSLGAENSVAYSNNSIAIPTNFTISVTTEILPVSMTKTSVDCTMYICGDSTECSNLLLQYGSFCTQLKRALTGIAVEQDKNTQEVFAQVKQIYKTPPIKYFGGFNFSQILPDPSKPSKRSFIEDLLFNKVTLADAGFIKQYGDCLGDIAARDLICAQKFNGLTVLPPLLTDEMIAQYTSALLAGTITSGWTFGAGAALQIPFAMQMAYRFNGIGVTQNVLYENQKLIANQFNSAIGKIQDSLSSTASALGKLQDVVNHNAQALNTLVKQLSSKFGAISSVLNDILSRLDKVEAEVQIDRLITGRLQSLQTYVTQQLIRAAEIRASANLAATKMSECVLGQSKRVDFCGKGYHLMSFPQSAPHGVVFLHVTYVPAQEKNFTTAPAICHDGKAHFPREGVFVSNGTHWFVTQRNFYEPQIITTDNTFVSGNCDVVIGIVNNTVYDPLQPELDSFKEELDKYFKNHTSPDVDLGDISGINASVVNIQKEIDRLNEVAKNLNESLIDLQELGKYEQYIKWPWYIWLGFIAGLIAIVMVTIMLCCMTSCCSCLKGCCSCGSCCKFDEDDSEPVLKGVKLHYT

SEQ ID NO: 303 - protein, 1269 aa, synthetic construct
MFVFLVLLPLVSSQCVNLITRTQSYTNSFTRGVYYPDKVFRSSVLHSTHDLFLPFFSNVTWFHAIHVSGTNGTKRFDNPALPFNDGVYFASTEKSNIIRGWIFGTTLDSKTQSLLIVNNATNVVIKVCEFQFCNDPFLDVYQKNNKSWMESEFRVYSSANNCTFEYVSQPFLMDLEGKEGNFKNLREFVFKNIDGYFKIYSKHTPINLERDLPQGFSALEPLVDLPIGINITRFQTLLALHRSYLTPVDSSSGWTAGAAAYYVGYLQPRTFLLKYNENGTITDAVDCALDPLSETKCTLKSFTVEKGIYQTSNFRVQPTESIVRFPNITNLCPFHEVFNATTFASVYAWNRKRISNCVADYSVIYNFAPFFAFKCYGVSPTKLNDLCFTNVYADSFVIRGNEVSQIAPGQTGNIADYNYKLPDDFTGCVIAWNSNKLDSTPSGNYNYLYRLLRKSKLKPFERDISTEIYQAGNKPCNGVAGPNCYSPLQSYGFRPTYGVGHQPYRVVVLSFELLHAPATVCGPKKSTNLVKNKCVNFNFNGLTGTGVLTESNKKFLPFQQFGRDIADTTDAVRDPQTLEILDITPCSFGGVSVITPGTNTSNQVAVLYQGVNCTEVPVAIHADQLTPTWRVYSTGSNVFQTRAGCLIGAEYVNNSYECDIPIGAGICASYQTQTKSHQQAQSVASQSIIAYTMSLGAENSVAYSNNSIAIPTNFTISVTTEILPVSMTKTSVDCTMYICGDSTECSNLLLQYGSFCTQLKRALTGIAVEQDKNTQEVFAQVKQIYKTPPIKYFGGFNFSQILPDPSKPSKRSFIEDLLFNKVTLADAGFIKQYGDCLGDIAARDLICAQKFNGLTVLPPLLTDEMIAQYTSALLAGTITSGWTFGAGAALQIPFAMQMAYRFNGIGVTQNVLYENQKLIANQFNSAIGKIQDSLSSTASALGKLQDVVNHNAQALNTLVKQLSSKFGAISSVLNDILSRLDPPEAEVQIDRLITGRLQSLQTYVTQQLIRAAEIRASANLAATKMSECVLGQSKRVDFCGKGYHLMSFPQSAPHGVVFLHVTYVPAQEKNFTTAPAICHDGKAHFPREGVFVSNGTHWFVTQRNFYEPQIITTDNTFVSGNCDVVIGIVNNTVYDPLQPELDSFKEELDKYFKNHTSPDVDLGDISGINASVVNIQKEIDRLNEVAKNLNESLIDLQELGKYEQYIKWPWYIWLGFIAGLIAIVMVTIMLCCMTSCCSCLKGCCSCGSCCKFDEDDSEPVLKGVKLHYT

SEQ ID NO: 304 - protein, 1256 aa, synthetic construct
QCVNLITRTQSYTNSFTRGVYYPDKVFRSSVLHSTHDLFLPFFSNVTWFHAIHVSGTNGTKRFDNPALPFNDGVYFASTEKSNIIRGWIFGTTLDSKTQSLLIVNNATNVVIKVCEFQFCNDPFLDVYQKNNKSWMESEFRVYSSANNCTFEYVSQPFLMDLEGKEGNFKNLREFVFKNIDGYFKIYSKHTPINLERDLPQGFSALEPLVDLPIGINITRFQTLLALHRSYLTPVDSSSGWTAGAAAYYVGYLQPRTFLLKYNENGTITDAVDCALDPLSETKCTLKSFTVEKGIYQTSNFRVQPTESIVRFPNITNLCPFHEVFNATTFASVYAWNRKRISNCVADYSVIYNFAPFFAFKCYGVSPTKLNDLCFTNVYADSFVIRGNEVSQIAPGQTGNIADYNYKLPDDFTGCVIAWNSNKLDSTPSGNYNYLYRLLRKSKLKPFERDISTEIYQAGNKPCNGVAGPNCYSPLQSYGFRPTYGVGHQPYRVVVLSFELLHAPATVCGPKKSTNLVKNKCVNFNFNGLTGTGVLTESNKKFLPFQQFGRDIADTTDAVRDPQTLEILDITPCSFGGVSVITPGTNTSNQVAVLYQGVNCTEVPVAIHADQLTPTWRVYSTGSNVFQTRAGCLIGAEYVNNSYECDIPIGAGICASYQTQTKSHQQAQSVASQSIIAYTMSLGAENSVAYSNNSIAIPTNFTISVTTEILPVSMTKTSVDCTMYICGDSTECSNLLLQYGSFCTQLKRALTGIAVEQDKNTQEVFAQVKQIYKTPPIKYFGGFNFSQILPDPSKPSKRSFIEDLLFNKVTLADAGFIKQYGDCLGDIAARDLICAQKFNGLTVLPPLLTDEMIAQYTSALLAGTITSGWTFGAGAALQIPFAMQMAYRFNGIGVTQNVLYENQKLIANQFNSAIGKIQDSLSSTASALGKLQDVVNHNAQALNTLVKQLSSKFGAISSVLNDILSRLDPPEAEVQIDRLITGRLQSLQTYVTQQLIRAAEIRASANLAATKMSECVLGQSKRVDFCGKGYHLMSFPQSAPHGVVFLHVTYVPAQEKNFTTAPAICHDGKAHFPREGVFVSNGTHWFVTQRNFYEPQIITTDNTFVSGNCDVVIGIVNNTVYDPLQPELDSFKEELDKYFKNHTSPDVDLGDISGINASVVNIQKEIDRLNEVAKNLNESLIDLQELGKYEQYIKWPWYIWLGFIAGLIAIVMVTIMLCCMTSCCSCLKGCCSCGSCCKFDEDDSEPVLKGVKLHYT

SEQ ID NO: 305 - protein, 1269 aa, synthetic construct
MFVFLVLLPLVSSQCVNLITRTQSYTNSFTRGVYYPDKVFRSSVLHSTHDLFLPFFSNVTWFHAIHVSGTNGTKRFDNPALPFNDGVYFASTEKSNIIRGWIFGTTLDSKTQSLLIVNNATNVVIKVCEFQFCNDPFLDVYQKNNKSWMESEFRVYSSANNCTFEYVSQPFLMDLEGKEGNFKNLREFVFKNIDGYFKIYSKHTPINLERDLPQGFSALEPLVDLPIGINITRFQTLLALHRSYLTPVDSSSGWTAGAAAYYVGYLQPRTFLLKYNENGTITDAVDCALDPLSETKCTLKSFTVEKGIYQTSNFRVQPTESIVRFPNITNLCPFHEVFNATTFASVYAWNRKRISNCVADYSVIYNFAPFFAFKCYGVSPTKLNDLCFTNVYADSFVIRGNEVSQIAPGQTGNIADYNYKLPDDFTGCVIAWNSNKLDSKPSGNYNYLYRLLRKSKLKPFERDISTEIYQAGNKPCNGVAGSNCYSPLQSYGFRPTYGVGHQPYRVVVLSFELLHAPATVCGPKKSTNLVKNKCVNFNFNGLTGTGVLTESNKKFLPFQQFGRDIADTTDAVRDPQTLEILDITPCSFGGVSVITPGTNTSNQVAVLYQGVNCTEVPVAIHADQLTPTWRVYSTGSNVFQTRAGCLIGAEYVNNSYECDIPIGAGICASYQTQTKSHRRARSVASQSIIAYTMSLGAENSVAYSNNSIAIPTNFTISVTTEILPVSMTKTSVDCTMYICGDSTECSNLLLQYGSFCTQLKRALTGIAVEQDKNTQEVFAQVKQIYKTPPIKYFGGFNFSQILPDPSKPSKRSFIEDLLFNKVTLADAGFIKQYGDCLGDIAARDLICAQKFNGLTVLPPLLTDEMIAQYTSALLAGTITSGWTFGAGAALQIPFAMQMAYRFNGIGVTQNVLYENQKLIANQFNSAIGKIQDSLSSTASALGKLQDVVNHNAQALNTLVKQLSSKFGAISSVLNDILSRLDKVEAEVQIDRLITGRLQSLQTYVTQQLIRAAEIRASANLAATKMSECVLGQSKRVDFCGKGYHLMSFPQSAPHGVVFLHVTYVPAQEKNFTTAPAICHDGKAHFPREGVFVSNGTHWFVTQRNFYEPQIITTDNTFVSGNCDVVIGIVNNTVYDPLQPELDSFKEELDKYFKNHTSPDVDLGDISGINASVVNIQKEIDRLNEVAKNLNESLIDLQELGKYEQYIKWPWYIWLGFIAGLIAIVMVTIMLCCMTSCCSCLKGCCSCGSCCKFDEDDSEPVLKGVKLHYT

SEQ ID NO: 306 - protein, 1256 aa, synthetic construct
QCVNLITRTQSYTNSFTRGVYYPDKVFRSSVLHSTHDLFLPFFSNVTWFHAIHVSGTNGTKRFDNPALPFNDGVYFASTEKSNIIRGWIFGTTLDSKTQSLLIVNNATNVVIKVCEFQFCNDPFLDVYQKNNKSWMESEFRVYSSANNCTFEYVSQPFLMDLEGKEGNFKNLREFVFKNIDGYFKIYSKHTPINLERDLPQGFSALEPLVDLPIGINITRFQTLLALHRSYLTPVDSSSGWTAGAAAYYVGYLQPRTFLLKYNENGTITDAVDCALDPLSETKCTLKSFTVEKGIYQTSNFRVQPTESIVRFPNITNLCPFHEVFNATTFASVYAWNRKRISNCVADYSVIYNFAPFFAFKCYGVSPTKLNDLCFTNVYADSFVIRGNEVSQIAPGQTGNIADYNYKLPDDFTGCVIAWNSNKLDSKPSGNYNYLYRLLRKSKLKPFERDISTEIYQAGNKPCNGVAGSNCYSPLQSYGFRPTYGVGHQPYRVVVLSFELLHAPATVCGPKKSTNLVKNKCVNFNFNGLTGTGVLTESNKKFLPFQQFGRDIADTTDAVRDPQTLEILDITPCSFGGVSVITPGTNTSNQVAVLYQGVNCTEVPVAIHADQLTPTWRVYSTGSNVFQTRAGCLIGAEYVNNSYECDIPIGAGICASYQTQTKSHRRARSVASQSIIAYTMSLGAENSVAYSNNSIAIPTNFTISVTTEILPVSMTKTSVDCTMYICGDSTECSNLLLQYGSFCTQLKRALTGIAVEQDKNTQEVFAQVKQIYKTPPIKYFGGFNFSQILPDPSKPSKRSFIEDLLFNKVTLADAGFIKQYGDCLGDIAARDLICAQKFNGLTVLPPLLTDEMIAQYTSALLAGTITSGWTFGAGAALQIPFAMQMAYRFNGIGVTQNVLYENQKLIANQFNSAIGKIQDSLSSTASALGKLQDVVNHNAQALNTLVKQLSSKFGAISSVLNDILSRLDKVEAEVQIDRLITGRLQSLQTYVTQQLIRAAEIRASANLAATKMSECVLGQSKRVDFCGKGYHLMSFPQSAPHGVVFLHVTYVPAQEKNFTTAPAICHDGKAHFPREGVFVSNGTHWFVTQRNFYEPQIITTDNTFVSGNCDVVIGIVNNTVYDPLQPELDSFKEELDKYFKNHTSPDVDLGDISGINASVVNIQKEIDRLNEVAKNLNESLIDLQELGKYEQYIKWPWYIWLGFIAGLIAIVMVTIMLCCMTSCCSCLKGCCSCGSCCKFDEDDSEPVLKGVKLHYT

SEQ ID NO: 307 - protein, 1269 aa, synthetic construct
MFVFLVLLPLVSSQCVNLITRTQSYTNSFTRGVYYPDKVFRSSVLHSTHDLFLPFFSNVTWFHAIHVSGTNGTKRFDNPALPFNDGVYFASTEKSNIIRGWIFGTTLDSKTQSLLIVNNATNVVIKVCEFQFCNDPFLDVYQKNNKSWMESEFRVYSSANNCTFEYVSQPFLMDLEGKEGNFKNLREFVFKNIDGYFKIYSKHTPINLERDLPQGFSALEPLVDLPIGINITRFQTLLALHRSYLTPVDSSSGWTAGAAAYYVGYLQPRTFLLKYNENGTITDAVDCALDPLSETKCTLKSFTVEKGIYQTSNFRVQPTESIVRFPNITNLCPFHEVFNATTFASVYAWNRKRISNCVADYSVIYNFAPFFAFKCYGVSPTKLNDLCFTNVYADSFVIRGNEVSQIAPGQTGNIADYNYKLPDDFTGCVIAWNSNKLDSKPSGNYNYLYRLLRKSKLKPFERDISTEIYQAGNKPCNGVAGSNCYSPLQSYGFRPTYGVGHQPYRVVVLSFELLHAPATVCGPKKSTNLVKNKCVNFNFNGLTGTGVLTESNKKFLPFQQFGRDIADTTDAVRDPQTLEILDITPCSFGGVSVITPGTNTSNQVAVLYQGVNCTEVPVAIHADQLTPTWRVYSTGSNVFQTRAGCLIGAEYVNNSYECDIPIGAGICASYQTQTKSHQQAQSVASQSIIAYTMSLGAENSVAYSNNSIAIPTNFTISVTTEILPVSMTKTSVDCTMYICGDSTECSNLLLQYGSFCTQLKRALTGIAVEQDKNTQEVFAQVKQIYKTPPIKYFGGFNFSQILPDPSKPSKRSFIEDLLFNKVTLADAGFIKQYGDCLGDIAARDLICAQKFNGLTVLPPLLTDEMIAQYTSALLAGTITSGWTFGAGAALQIPFAMQMAYRFNGIGVTQNVLYENQKLIANQFNSAIGKIQDSLSSTASALGKLQDVVNHNAQALNTLVKQLSSKFGAISSVLNDILSRLDPPEAEVQIDRLITGRLQSLQTYVTQQLIRAAEIRASANLAATKMSECVLGQSKRVDFCGKGYHLMSFPQSAPHGVVFLHVTYVPAQEKNFTTAPAICHDGKAHFPREGVFVSNGTHWFVTQRNFYEPQIITTDNTFVSGNCDVVIGIVNNTVYDPLQPELDSFKEELDKYFKNHTSPDVDLGDISGINASVVNIQKEIDRLNEVAKNLNESLIDLQELGKYEQYIKWPWYIWLGFIAGLIAIVMVTIMLCCMTSCCSCLKGCCSCGSCCKFDEDDSEPVLKGVKLHYT

SEQ ID NO: 308 - protein, 1256 aa, synthetic construct
QCVNLITRTQSYTNSFTRGVYYPDKVFRSSVLHSTHDLFLPFFSNVTWFHAIHVSGTNGTKRFDNPALPFNDGVYFASTEKSNIIRGWIFGTTLDSKTQSLLIVNNATNVVIKVCEFQFCNDPFLDVYQKNNKSWMESEFRVYSSANNCTFEYVSQPFLMDLEGKEGNFKNLREFVFKNIDGYFKIYSKHTPINLERDLPQGFSALEPLVDLPIGINITRFQTLLALHRSYLTPVDSSSGWTAGAAAYYVGYLQPRTFLLKYNENGTITDAVDCALDPLSETKCTLKSFTVEKGIYQTSNFRVQPTESIVRFPNITNLCPFHEVFNATTFASVYAWNRKRISNCVADYSVIYNFAPFFAFKCYGVSPTKLNDLCFTNVYADSFVIRGNEVSQIAPGQTGNIADYNYKLPDDFTGCVIAWNSNKLDSKPSGNYNYLYRLLRKSKLKPFERDISTEIYQAGNKPCNGVAGSNCYSPLQSYGFRPTYGVGHQPYRVVVLSFELLHAPATVCGPKKSTNLVKNKCVNFNFNGLTGTGVLTESNKKFLPFQQFGRDIADTTDAVRDPQTLEILDITPCSFGGVSVITPGTNTSNQVAVLYQGVNCTEVPVAIHADQLTPTWRVYSTGSNVFQTRAGCLIGAEYVNNSYECDIPIGAGICASYQTQTKSHQQAQSVASQSIIAYTMSLGAENSVAYSNNSIAIPTNFTISVTTEILPVSMTKTSVDCTMYICGDSTECSNLLLQYGSFCTQLKRALTGIAVEQDKNTQEVFAQVKQIYKTPPIKYFGGFNFSQILPDPSKPSKRSFIEDLLFNKVTLADAGFIKQYGDCLGDIAARDLICAQKFNGLTVLPPLLTDEMIAQYTSALLAGTITSGWTFGAGAALQIPFAMQMAYRFNGIGVTQNVLYENQKLIANQFNSAIGKIQDSLSSTASALGKLQDVVNHNAQALNTLVKQLSSKFGAISSVLNDILSRLDPPEAEVQIDRLITGRLQSLQTYVTQQLIRAAEIRASANLAATKMSECVLGQSKRVDFCGKGYHLMSFPQSAPHGVVFLHVTYVPAQEKNFTTAPAICHDGKAHFPREGVFVSNGTHWFVTQRNFYEPQIITTDNTFVSGNCDVVIGIVNNTVYDPLQPELDSFKEELDKYFKNHTSPDVDLGDISGINASVVNIQKEIDRLNEVAKNLNESLIDLQELGKYEQYIKWPWYIWLGFIAGLIAIVMVTIMLCCMTSCCSCLKGCCSCGSCCKFDEDDSEPVLKGVKLHYT

SEQ ID NO: 309 - protein, 1269 aa, Severe acute respiratory syndrome-related coronavirus
MFVFLVLLPLVSSQCVNLITRTQSYTNSFTRGVYYPDKVFRSSVLHSTQDLFLPFFSNVTWFHAIHVSGTNGTKRFDNPALPFNDGVYFASTEKSNIIRGWIFGTTLDSKTQSLLIVNNATNVVIKVCEFQFCNDPFLDVYQKNNKSWMESEFRVYSSANNCTFEYVSQPFLMDLVGKEGNFKNLREFVFKNIDGYFKIYSKHTPINLERDLPQGFSALEPLVDLPIGINITRFQTLLALHRSYLTPVDSSSGWTAGAAAYYVGYLQPRTFLLKYNENGTITDAVDCALDPLSETKCTLKSFTVEKGIYQTSNFRVQPTESIVRFPNITNLCPFHEVFNATTFASVYAWNRKRISNCVADYSVIYNFAPFFAFKCYGVSPTKLNDLCFTNVYADSFVIRGNEVSQIAPGQTGNIADYNYKLPDDFTGCVIAWNSNKLDSKPSGNYNYLYRLLRKSKLKPFERDISTEIYQAGNRPCNGVAGPNCYSPLQSYGFRPTYGVGHQPYRVVVLSFELLHAPATVCGPKKSTNLVKNKCVNFNFNGLTGTGVLTESNKKFLPFQQFGRDIADTTDAVRDPQTLEILDITPCSFGGVSVITPGTNTSNQVAVLYQGVNCTEVPVAIHADQLTPTWRVYSTGSNVFQTRAGCLIGAEYVNNSYECDIPIGAGICASYQTQTKSHRRARSVASQSIIAYTMSLGAENSVAYSNNSIAIPTNFTISVTTEILPVSMTKTSVDCTMYICGDSTECSNLLLQYGSFCTQLKRALTGIAVEQDKNTQEVFAQVKQIYKTPPIKYFGGFNFSQILPDPSKPSKRSFIEDLLFNKVTLADAGFIKQYGDCLGDIAARDLICAQKFNGLTVLPPLLTDEMIAQYTSALLAGTITSGWTFGAGAALQIPFAMQMAYRFNGIGVTQNVLYENQKLIANQFNSAIGKIQDSLSSTASALGKLQDVVNHNAQALNTLVKQLSSKFGAISSVLNDILSRLDKVEAEVQIDRLITGRLQSLQTYVTQQLIRAAEIRASANLAATKMSECVLGQSKRVDFCGKGYHLMSFPQSAPHGVVFLHVTYVPAQEKNFTTAPAICHDGKAHFPREGVFVSNGTHWFVTQRNFYEPQIITTDNTFVSGNCDVVIGIVNNTVYDPLQPELDSFKEELDKYFKNHTSPDVDLGDISGINASVVNIQKEIDRLNEVAKNLNESLIDLQELGKYEQYIKWPWYIWLGFIAGLIAIVMVTIMLCCMTSCCSCLKGCCSCGSCCKFDEDDSEPVLKGVKLHYT

SEQ ID NO: 310 - protein, 1256 aa, Severe acute respiratory syndrome-related coronavirus
QCVNLITRTQSYTNSFTRGVYYPDKVFRSSVLHSTQDLFLPFFSNVTWFHAIHVSGTNGTKRFDNPALPFNDGVYFASTEKSNIIRGWIFGTTLDSKTQSLLIVNNATNVVIKVCEFQFCNDPFLDVYQKNNKSWMESEFRVYSSANNCTFEYVSQPFLMDLVGKEGNFKNLREFVFKNIDGYFKIYSKHTPINLERDLPQGFSALEPLVDLPIGINITRFQTLLALHRSYLTPVDSSSGWTAGAAAYYVGYLQPRTFLLKYNENGTITDAVDCALDPLSETKCTLKSFTVEKGIYQTSNFRVQPTESIVRFPNITNLCPFHEVFNATTFASVYAWNRKRISNCVADYSVIYNFAPFFAFKCYGVSPTKLNDLCFTNVYADSFVIRGNEVSQIAPGQTGNIADYNYKLPDDFTGCVIAWNSNKLDSKPSGNYNYLYRLLRKSKLKPFERDISTEIYQAGNRPCNGVAGPNCYSPLQSYGFRPTYGVGHQPYRVVVLSFELLHAPATVCGPKKSTNLVKNKCVNFNFNGLTGTGVLTESNKKFLPFQQFGRDIADTTDAVRDPQTLEILDITPCSFGGVSVITPGTNTSNQVAVLYQGVNCTEVPVAIHADQLTPTWRVYSTGSNVFQTRAGCLIGAEYVNNSYECDIPIGAGICASYQTQTKSHRRARSVASQSIIAYTMSLGAENSVAYSNNSIAIPTNFTISVTTEILPVSMTKTSVDCTMYICGDSTECSNLLLQYGSFCTQLKRALTGIAVEQDKNTQEVFAQVKQIYKTPPIKYFGGFNFSQILPDPSKPSKRSFIEDLLFNKVTLADAGFIKQYGDCLGDIAARDLICAQKFNGLTVLPPLLTDEMIAQYTSALLAGTITSGWTFGAGAALQIPFAMQMAYRFNGIGVTQNVLYENQKLIANQFNSAIGKIQDSLSSTASALGKLQDVVNHNAQALNTLVKQLSSKFGAISSVLNDILSRLDKVEAEVQIDRLITGRLQSLQTYVTQQLIRAAEIRASANLAATKMSECVLGQSKRVDFCGKGYHLMSFPQSAPHGVVFLHVTYVPAQEKNFTTAPAICHDGKAHFPREGVFVSNGTHWFVTQRNFYEPQIITTDNTFVSGNCDVVIGIVNNTVYDPLQPELDSFKEELDKYFKNHTSPDVDLGDISGINASVVNIQKEIDRLNEVAKNLNESLIDLQELGKYEQYIKWPWYIWLGFIAGLIAIVMVTIMLCCMTSCCSCLKGCCSCGSCCKFDEDDSEPVLKGVKLHYT

SEQ ID NO: 311 - protein, 1269 aa, synthetic construct
MFVFLVLLPLVSSQCVNLITRTQSYTNSFTRGVYYPDKVFRSSVLHSTQDLFLPFFSNVTWFHAIHVSGTNGTKRFDNPALPFNDGVYFASTEKSNIIRGWIFGTTLDSKTQSLLIVNNATNVVIKVCEFQFCNDPFLDVYQKNNKSWMESEFRVYSSANNCTFEYVSQPFLMDLVGKEGNFKNLREFVFKNIDGYFKIYSKHTPINLERDLPQGFSALEPLVDLPIGINITRFQTLLALHRSYLTPVDSSSGWTAGAAAYYVGYLQPRTFLLKYNENGTITDAVDCALDPLSETKCTLKSFTVEKGIYQTSNFRVQPTESIVRFPNITNLCPFHEVFNATTFASVYAWNRKRISNCVADYSVIYNFAPFFAFKCYGVSPTKLNDLCFTNVYADSFVIRGNEVSQIAPGQTGNIADYNYKLPDDFTGCVIAWNSNKLDSKPSGNYNYLYRLLRKSKLKPFERDISTEIYQAGNRPCNGVAGPNCYSPLQSYGFRPTYGVGHQPYRVVVLSFELLHAPATVCGPKKSTNLVKNKCVNFNFNGLTGTGVLTESNKKFLPFQQFGRDIADTTDAVRDPQTLEILDITPCSFGGVSVITPGTNTSNQVAVLYQGVNCTEVPVAIHADQLTPTWRVYSTGSNVFQTRAGCLIGAEYVNNSYECDIPIGAGICASYQTQTKSHQQAQSVASQSIIAYTMSLGAENSVAYSNNSIAIPTNFTISVTTEILPVSMTKTSVDCTMYICGDSTECSNLLLQYGSFCTQLKRALTGIAVEQDKNTQEVFAQVKQIYKTPPIKYFGGFNFSQILPDPSKPSKRSFIEDLLFNKVTLADAGFIKQYGDCLGDIAARDLICAQKFNGLTVLPPLLTDEMIAQYTSALLAGTITSGWTFGAGAALQIPFAMQMAYRFNGIGVTQNVLYENQKLIANQFNSAIGKIQDSLSSTASALGKLQDVVNHNAQALNTLVKQLSSKFGAISSVLNDILSRLDPPEAEVQIDRLITGRLQSLQTYVTQQLIRAAEIRASANLAATKMSECVLGQSKRVDFCGKGYHLMSFPQSAPHGVVFLHVTYVPAQEKNFTTAPAICHDGKAHFPREGVFVSNGTHWFVTQRNFYEPQIITTDNTFVSGNCDVVIGIVNNTVYDPLQPELDSFKEELDKYFKNHTSPDVDLGDISGINASVVNIQKEIDRLNEVAKNLNESLIDLQELGKYEQYIKWPWYIWLGFIAGLIAIVMVTIMLCCMTSCCSCLKGCCSCGSCCKFDEDDSEPVLKGVKLHYT

SEQ ID NO: 312 - protein, 1256 aa, synthetic construct
QCVNLITRTQSYTNSFTRGVYYPDKVFRSSVLHSTQDLFLPFFSNVTWFHAIHVSGTNGTKRFDNPALPFNDGVYFASTEKSNIIRGWIFGTTLDSKTQSLLIVNNATNVVIKVCEFQFCNDPFLDVYQKNNKSWMESEFRVYSSANNCTFEYVSQPFLMDLVGKEGNFKNLREFVFKNIDGYFKIYSKHTPINLERDLPQGFSALEPLVDLPIGINITRFQTLLALHRSYLTPVDSSSGWTAGAAAYYVGYLQPRTFLLKYNENGTITDAVDCALDPLSETKCTLKSFTVEKGIYQTSNFRVQPTESIVRFPNITNLCPFHEVFNATTFASVYAWNRKRISNCVADYSVIYNFAPFFAFKCYGVSPTKLNDLCFTNVYADSFVIRGNEVSQIAPGQTGNIADYNYKLPDDFTGCVIAWNSNKLDSKPSGNYNYLYRLLRKSKLKPFERDISTEIYQAGNRPCNGVAGPNCYSPLQSYGFRPTYGVGHQPYRVVVLSFELLHAPATVCGPKKSTNLVKNKCVNFNFNGLTGTGVLTESNKKFLPFQQFGRDIADTTDAVRDPQTLEILDITPCSFGGVSVITPGTNTSNQVAVLYQGVNCTEVPVAIHADQLTPTWRVYSTGSNVFQTRAGCLIGAEYVNNSYECDIPIGAGICASYQTQTKSHQQAQSVASQSIIAYTMSLGAENSVAYSNNSIAIPTNFTISVTTEILPVSMTKTSVDCTMYICGDSTECSNLLLQYGSFCTQLKRALTGIAVEQDKNTQEVFAQVKQIYKTPPIKYFGGFNFSQILPDPSKPSKRSFIEDLLFNKVTLADAGFIKQYGDCLGDIAARDLICAQKFNGLTVLPPLLTDEMIAQYTSALLAGTITSGWTFGAGAALQIPFAMQMAYRFNGIGVTQNVLYENQKLIANQFNSAIGKIQDSLSSTASALGKLQDVVNHNAQALNTLVKQLSSKFGAISSVLNDILSRLDPPEAEVQIDRLITGRLQSLQTYVTQQLIRAAEIRASANLAATKMSECVLGQSKRVDFCGKGYHLMSFPQSAPHGVVFLHVTYVPAQEKNFTTAPAICHDGKAHFPREGVFVSNGTHWFVTQRNFYEPQIITTDNTFVSGNCDVVIGIVNNTVYDPLQPELDSFKEELDKYFKNHTSPDVDLGDISGINASVVNIQKEIDRLNEVAKNLNESLIDLQELGKYEQYIKWPWYIWLGFIAGLIAIVMVTIMLCCMTSCCSCLKGCCSCGSCCKFDEDDSEPVLKGVKLHYT

SEQ ID NO: 313 - protein, 1269 aa, synthetic construct
MFVFLVLLPLVSSQCVNLITRTQSYTNSFTRGVYYPDKVFRSSVLHSTQDLFLPFFSNVTWFHAIHVSGTNGTKRFDNPALPFNDGVYFASTEKSNIIRGWIFGTTLDSKTQSLLIVNNATNVVIKVCEFQFCNDPFLDVYQKNNKSWMESEFRVYSSANNCTFEYVSQPFLMDLVGKEGNFKNLREFVFKNIDGYFKIYSKHTPINLERDLPQGFSALEPLVDLPIGINITRFQTLLALHRSYLTPVDSSSGWTAGAAAYYVGYLQPRTFLLKYNENGTITDAVDCALDPLSETKCTLKSFTVEKGIYQTSNFRVQPTESIVRFPNITNLCPFHEVFNATTFASVYAWNRKRISNCVADYSVIYNFAPFFAFKCYGVSPTKLNDLCFTNVYADSFVIRGNEVSQIAPGQTGNIADYNYKLPDDFTGCVIAWNSNKLDSKPSGNYNYLYRLLRKSKLKPFERDISTEIYQAGNRPCNGVAGPNCYSPLQSYGFRPTYGVGHQPYRVVVLSFELLHASATVCGPKKSTNLVKNKCVNFNFNGLTGTGVLTESNKKFLPFQQFGRDIADTTDAVRDPQTLEILDITPCSFGGVSVITPGTNTSNQVAVLYQGVNCTEVPVAIHADQLTPTWRVYSTGSNVFQTRAGCLIGAEYVNNSYECDIPIGAGICASYQTQTKSHRRARSVASQSIIAYTMSLGAENSVAYSNNSIAIPTNFTISVTTEILPVSMTKTSVDCTMYICGDSTECSNLLLQYGSFCTQLKRALTGIAVEQDKNTQEVFAQVKQIYKTPPIKYFGGFNFSQILPDPSKPSKRSFIEDLLFNKVTLADAGFIKQYGDCLGDIAARDLICAQKFNGLTVLPPLLTDEMIAQYTSALLAGTITSGWTFGAGAALQIPFAMQMAYRFNGIGVTQNVLYENQKLIANQFNSAIGKIQDSLSSTASALGKLQDVVNHNAQALNTLVKQLSSKFGAISSVLNDILSRLDKVEAEVQIDRLITGRLQSLQTYVTQQLIRAAEIRASANLAATKMSECVLGQSKRVDFCGKGYHLMSFPQSAPHGVVFLHVTYVPAQEKNFTTAPAICHDGKAHFPREGVFVSNGTHWFVTQRNFYEPQIITTDNTFVSGNCDVVIGIVNNTVYDPLQPELDSFKEELDKYFKNHTSPDVDLGDISGINASVVNIQKEIDRLNEVAKNLNESLIDLQELGKYEQYIKWPWYIWLGFIAGLIAIVMVTIMLCCMTSCCSCLKGCCSCGSCCKFDEDDSEPVLKGVKLHYT

SEQ ID NO: 314 - protein, 1256 aa, synthetic construct
QCVNLITRTQSYTNSFTRGVYYPDKVFRSSVLHSTQDLFLPFFSNVTWFHAIHVSGTNGTKRFDNPALPFNDGVYFASTEKSNIIRGWIFGTTLDSKTQSLLIVNNATNVVIKVCEFQFCNDPFLDVYQKNNKSWMESEFRVYSSANNCTFEYVSQPFLMDLVGKEGNFKNLREFVFKNIDGYFKIYSKHTPINLERDLPQGFSALEPLVDLPIGINITRFQTLLALHRSYLTPVDSSSGWTAGAAAYYVGYLQPRTFLLKYNENGTITDAVDCALDPLSETKCTLKSFTVEKGIYQTSNFRVQPTESIVRFPNITNLCPFHEVFNATTFASVYAWNRKRISNCVADYSVIYNFAPFFAFKCYGVSPTKLNDLCFTNVYADSFVIRGNEVSQIAPGQTGNIADYNYKLPDDFTGCVIAWNSNKLDSKPSGNYNYLYRLLRKSKLKPFERDISTEIYQAGNRPCNGVAGPNCYSPLQSYGFRPTYGVGHQPYRVVVLSFELLHASATVCGPKKSTNLVKNKCVNFNFNGLTGTGVLTESNKKFLPFQQFGRDIADTTDAVRDPQTLEILDITPCSFGGVSVITPGTNTSNQVAVLYQGVNCTEVPVAIHADQLTPTWRVYSTGSNVFQTRAGCLIGAEYVNNSYECDIPIGAGICASYQTQTKSHRRARSVASQSIIAYTMSLGAENSVAYSNNSIAIPTNFTISVTTEILPVSMTKTSVDCTMYICGDSTECSNLLLQYGSFCTQLKRALTGIAVEQDKNTQEVFAQVKQIYKTPPIKYFGGFNFSQILPDPSKPSKRSFIEDLLFNKVTLADAGFIKQYGDCLGDIAARDLICAQKFNGLTVLPPLLTDEMIAQYTSALLAGTITSGWTFGAGAALQIPFAMQMAYRFNGIGVTQNVLYENQKLIANQFNSAIGKIQDSLSSTASALGKLQDVVNHNAQALNTLVKQLSSKFGAISSVLNDILSRLDKVEAEVQIDRLITGRLQSLQTYVTQQLIRAAEIRASANLAATKMSECVLGQSKRVDFCGKGYHLMSFPQSAPHGVVFLHVTYVPAQEKNFTTAPAICHDGKAHFPREGVFVSNGTHWFVTQRNFYEPQIITTDNTFVSGNCDVVIGIVNNTVYDPLQPELDSFKEELDKYFKNHTSPDVDLGDISGINASVVNIQKEIDRLNEVAKNLNESLIDLQELGKYEQYIKWPWYIWLGFIAGLIAIVMVTIMLCCMTSCCSCLKGCCSCGSCCKFDEDDSEPVLKGVKLHYT

SEQ ID NO: 315 - protein, 1269 aa, synthetic construct
MFVFLVLLPLVSSQCVNLITRTQSYTNSFTRGVYYPDKVFRSSVLHSTQDLFLPFFSNVTWFHAIHVSGTNGTKRFDNPALPFNDGVYFASTEKSNIIRGWIFGTTLDSKTQSLLIVNNATNVVIKVCEFQFCNDPFLDVYQKNNKSWMESEFRVYSSANNCTFEYVSQPFLMDLVGKEGNFKNLREFVFKNIDGYFKIYSKHTPINLERDLPQGFSALEPLVDLPIGINITRFQTLLALHRSYLTPVDSSSGWTAGAAAYYVGYLQPRTFLLKYNENGTITDAVDCALDPLSETKCTLKSFTVEKGIYQTSNFRVQPTESIVRFPNITNLCPFHEVFNATTFASVYAWNRKRISNCVADYSVIYNFAPFFAFKCYGVSPTKLNDLCFTNVYADSFVIRGNEVSQIAPGQTGNIADYNYKLPDDFTGCVIAWNSNKLDSKPSGNYNYLYRLLRKSKLKPFERDISTEIYQAGNRPCNGVAGPNCYSPLQSYGFRPTYGVGHQPYRVVVLSFELLHASATVCGPKKSTNLVKNKCVNFNFNGLTGTGVLTESNKKFLPFQQFGRDIADTTDAVRDPQTLEILDITPCSFGGVSVITPGTNTSNQVAVLYQGVNCTEVPVAIHADQLTPTWRVYSTGSNVFQTRAGCLIGAEYVNNSYECDIPIGAGICASYQTQTKSHQQAQSVASQSIIAYTMSLGAENSVAYSNNSIAIPTNFTISVTTEILPVSMTKTSVDCTMYICGDSTECSNLLLQYGSFCTQLKRALTGIAVEQDKNTQEVFAQVKQIYKTPPIKYFGGFNFSQILPDPSKPSKRSFIEDLLFNKVTLADAGFIKQYGDCLGDIAARDLICAQKFNGLTVLPPLLTDEMIAQYTSALLAGTITSGWTFGAGAALQIPFAMQMAYRFNGIGVTQNVLYENQKLIANQFNSAIGKIQDSLSSTASALGKLQDVVNHNAQALNTLVKQLSSKFGAISSVLNDILSRLDPPEAEVQIDRLITGRLQSLQTYVTQQLIRAAEIRASANLAATKMSECVLGQSKRVDFCGKGYHLMSFPQSAPHGVVFLHVTYVPAQEKNFTTAPAICHDGKAHFPREGVFVSNGTHWFVTQRNFYEPQIITTDNTFVSGNCDVVIGIVNNTVYDPLQPELDSFKEELDKYFKNHTSPDVDLGDISGINASVVNIQKEIDRLNEVAKNLNESLIDLQELGKYEQYIKWPWYIWLGFIAGLIAIVMVTIMLCCMTSCCSCLKGCCSCGSCCKFDEDDSEPVLKGVKLHYT

SEQ ID NO: 316 - protein, 1256 aa, synthetic construct
QCVNLITRTQSYTNSFTRGVYYPDKVFRSSVLHSTQDLFLPFFSNVTWFHAIHVSGTNGTKRFDNPALPFNDGVYFASTEKSNIIRGWIFGTTLDSKTQSLLIVNNATNVVIKVCEFQFCNDPFLDVYQKNNKSWMESEFRVYSSANNCTFEYVSQPFLMDLVGKEGNFKNLREFVFKNIDGYFKIYSKHTPINLERDLPQGFSALEPLVDLPIGINITRFQTLLALHRSYLTPVDSSSGWTAGAAAYYVGYLQPRTFLLKYNENGTITDAVDCALDPLSETKCTLKSFTVEKGIYQTSNFRVQPTESIVRFPNITNLCPFHEVFNATTFASVYAWNRKRISNCVADYSVIYNFAPFFAFKCYGVSPTKLNDLCFTNVYADSFVIRGNEVSQIAPGQTGNIADYNYKLPDDFTGCVIAWNSNKLDSKPSGNYNYLYRLLRKSKLKPFERDISTEIYQAGNRPCNGVAGPNCYSPLQSYGFRPTYGVGHQPYRVVVLSFELLHASATVCGPKKSTNLVKNKCVNFNFNGLTGTGVLTESNKKFLPFQQFGRDIADTTDAVRDPQTLEILDITPCSFGGVSVITPGTNTSNQVAVLYQGVNCTEVPVAIHADQLTPTWRVYSTGSNVFQTRAGCLIGAEYVNNSYECDIPIGAGICASYQTQTKSHQQAQSVASQSIIAYTMSLGAENSVAYSNNSIAIPTNFTISVTTEILPVSMTKTSVDCTMYICGDSTECSNLLLQYGSFCTQLKRALTGIAVEQDKNTQEVFAQVKQIYKTPPIKYFGGFNFSQILPDPSKPSKRSFIEDLLFNKVTLADAGFIKQYGDCLGDIAARDLICAQKFNGLTVLPPLLTDEMIAQYTSALLAGTITSGWTFGAGAALQIPFAMQMAYRFNGIGVTQNVLYENQKLIANQFNSAIGKIQDSLSSTASALGKLQDVVNHNAQALNTLVKQLSSKFGAISSVLNDILSRLDPPEAEVQIDRLITGRLQSLQTYVTQQLIRAAEIRASANLAATKMSECVLGQSKRVDFCGKGYHLMSFPQSAPHGVVFLHVTYVPAQEKNFTTAPAICHDGKAHFPREGVFVSNGTHWFVTQRNFYEPQIITTDNTFVSGNCDVVIGIVNNTVYDPLQPELDSFKEELDKYFKNHTSPDVDLGDISGINASVVNIQKEIDRLNEVAKNLNESLIDLQELGKYEQYIKWPWYIWLGFIAGLIAIVMVTIMLCCMTSCCSCLKGCCSCGSCCKFDEDDSEPVLKGVKLHYT

SEQ ID NO: 317 - protein, 1269 aa, synthetic construct
MFVFLVLLPLVSSQCVNLITRTQSYTNSFTRGVYYPDKVFRSSVLHSTQDLFLPFFSNVTWFHAIHVSGTNGTKRFDNPALPFNDGVYFASTEKSNIIRGWIFGTTLDSKTQSLLIVNNATNVVIKVCEFQFCNDPFLDVYQKNNKSWMESEFRVYSSANNCTFEYVSQPFLMDLVGKEGNFKNLREFVFKNIDGYFKIYSKHTPINLERDLPQGFSALEPLVDLPIGINITRFQTLLALHRSYLTPVDSSSGWTAGAAAYYVGYLQPRTFLLKYNENGTITDAVDCALDPLSETKCTLKSFTVEKGIYQTSNFRVQPTESIVRFPNITNLCPFHEVFNATTFASVYAWNRKRISNCVADYSVIYNFAPFFAFKCYGVSPTKLNDLCFTNVYADSFVIRGNEVSQIAPGQTGNIADYNYKLPDDFTGCVIAWNSNKLDSTPSGNYNYLYRLLRKSKLKPFERDISTEIYQAGNRPCNGVAGPNCYSPLQSYGFRPTYGVGHQPYRVVVLSFELLHAPATVCGPKKSTNLVKNKCVNFNFNGLTGTGVLTESNKKFLPFQQFGRDIADTTDAVRDPQTLEILDITPCSFGGVSVITPGTNTSNQVAVLYQGVNCTEVPVAIHADQLTPTWRVYSTGSNVFQTRAGCLIGAEYVNNSYECDIPIGAGICASYQTQTKSHRRARSVASQSIIAYTMSLGAENSVAYSNNSIAIPTNFTISVTTEILPVSMTKTSVDCTMYICGDSTECSNLLLQYGSFCTQLKRALTGIAVEQDKNTQEVFAQVKQIYKTPPIKYFGGFNFSQILPDPSKPSKRSFIEDLLFNKVTLADAGFIKQYGDCLGDIAARDLICAQKFNGLTVLPPLLTDEMIAQYTSALLAGTITSGWTFGAGAALQIPFAMQMAYRFNGIGVTQNVLYENQKLIANQFNSAIGKIQDSLSSTASALGKLQDVVNHNAQALNTLVKQLSSKFGAISSVLNDILSRLDKVEAEVQIDRLITGRLQSLQTYVTQQLIRAAEIRASANLAATKMSECVLGQSKRVDFCGKGYHLMSFPQSAPHGVVFLHVTYVPAQEKNFTTAPAICHDGKAHFPREGVFVSNGTHWFVTQRNFYEPQIITTDNTFVSGNCDVVIGIVNNTVYDPLQPELDSFKEELDKYFKNHTSPDVDLGDISGINASVVNIQKEIDRLNEVAKNLNESLIDLQELGKYEQYIKWPWYIWLGFIAGLIAIVMVTIMLCCMTSCCSCLKGCCSCGSCCKFDEDDSEPVLKGVKLHYT

SEQ ID NO: 318 - protein, 1256 aa, synthetic construct
QCVNLITRTQSYTNSFTRGVYYPDKVFRSSVLHSTQDLFLPFFSNVTWFHAIHVSGTNGTKRFDNPALPFNDGVYFASTEKSNIIRGWIFGTTLDSKTQSLLIVNNATNVVIKVCEFQFCNDPFLDVYQKNNKSWMESEFRVYSSANNCTFEYVSQPFLMDLVGKEGNFKNLREFVFKNIDGYFKIYSKHTPINLERDLPQGFSALEPLVDLPIGINITRFQTLLALHRSYLTPVDSSSGWTAGAAAYYVGYLQPRTFLLKYNENGTITDAVDCALDPLSETKCTLKSFTVEKGIYQTSNFRVQPTESIVRFPNITNLCPFHEVFNATTFASVYAWNRKRISNCVADYSVIYNFAPFFAFKCYGVSPTKLNDLCFTNVYADSFVIRGNEVSQIAPGQTGNIADYNYKLPDDFTGCVIAWNSNKLDSTPSGNYNYLYRLLRKSKLKPFERDISTEIYQAGNRPCNGVAGPNCYSPLQSYGFRPTYGVGHQPYRVVVLSFELLHAPATVCGPKKSTNLVKNKCVNFNFNGLTGTGVLTESNKKFLPFQQFGRDIADTTDAVRDPQTLEILDITPCSFGGVSVITPGTNTSNQVAVLYQGVNCTEVPVAIHADQLTPTWRVYSTGSNVFQTRAGCLIGAEYVNNSYECDIPIGAGICASYQTQTKSHRRARSVASQSIIAYTMSLGAENSVAYSNNSIAIPTNFTISVTTEILPVSMTKTSVDCTMYICGDSTECSNLLLQYGSFCTQLKRALTGIAVEQDKNTQEVFAQVKQIYKTPPIKYFGGFNFSQILPDPSKPSKRSFIEDLLFNKVTLADAGFIKQYGDCLGDIAARDLICAQKFNGLTVLPPLLTDEMIAQYTSALLAGTITSGWTFGAGAALQIPFAMQMAYRFNGIGVTQNVLYENQKLIANQFNSAIGKIQDSLSSTASALGKLQDVVNHNAQALNTLVKQLSSKFGAISSVLNDILSRLDKVEAEVQIDRLITGRLQSLQTYVTQQLIRAAEIRASANLAATKMSECVLGQSKRVDFCGKGYHLMSFPQSAPHGVVFLHVTYVPAQEKNFTTAPAICHDGKAHFPREGVFVSNGTHWFVTQRNFYEPQIITTDNTFVSGNCDVVIGIVNNTVYDPLQPELDSFKEELDKYFKNHTSPDVDLGDISGINASVVNIQKEIDRLNEVAKNLNESLIDLQELGKYEQYIKWPWYIWLGFIAGLIAIVMVTIMLCCMTSCCSCLKGCCSCGSCCKFDEDDSEPVLKGVKLHYT

SEQ ID NO: 319 - protein, 1269 aa, synthetic construct
MFVFLVLLPLVSSQCVNLITRTQSYTNSFTRGVYYPDKVFRSSVLHSTQDLFLPFFSNVTWFHAIHVSGTNGTKRFDNPALPFNDGVYFASTEKSNIIRGWIFGTTLDSKTQSLLIVNNATNVVIKVCEFQFCNDPFLDVYQKNNKSWMESEFRVYSSANNCTFEYVSQPFLMDLVGKEGNFKNLREFVFKNIDGYFKIYSKHTPINLERDLPQGFSALEPLVDLPIGINITRFQTLLALHRSYLTPVDSSSGWTAGAAAYYVGYLQPRTFLLKYNENGTITDAVDCALDPLSETKCTLKSFTVEKGIYQTSNFRVQPTESIVRFPNITNLCPFHEVFNATTFASVYAWNRKRISNCVADYSVIYNFAPFFAFKCYGVSPTKLNDLCFTNVYADSFVIRGNEVSQIAPGQTGNIADYNYKLPDDFTGCVIAWNSNKLDSTPSGNYNYLYRLLRKSKLKPFERDISTEIYQAGNRPCNGVAGPNCYSPLQSYGFRPTYGVGHQPYRVVVLSFELLHAPATVCGPKKSTNLVKNKCVNFNFNGLTGTGVLTESNKKFLPFQQFGRDIADTTDAVRDPQTLEILDITPCSFGGVSVITPGTNTSNQVAVLYQGVNCTEVPVAIHADQLTPTWRVYSTGSNVFQTRAGCLIGAEYVNNSYECDIPIGAGICASYQTQTKSHQQAQSVASQSIIAYTMSLGAENSVAYSNNSIAIPTNFTISVTTEILPVSMTKTSVDCTMYICGDSTECSNLLLQYGSFCTQLKRALTGIAVEQDKNTQEVFAQVKQIYKTPPIKYFGGFNFSQILPDPSKPSKRSFIEDLLFNKVTLADAGFIKQYGDCLGDIAARDLICAQKFNGLTVLPPLLTDEMIAQYTSALLAGTITSGWTFGAGAALQIPFAMQMAYRFNGIGVTQNVLYENQKLIANQFNSAIGKIQDSLSSTASALGKLQDVVNHNAQALNTLVKQLSSKFGAISSVLNDILSRLDPPEAEVQIDRLITGRLQSLQTYVTQQLIRAAEIRASANLAATKMSECVLGQSKRVDFCGKGYHLMSFPQSAPHGVVFLHVTYVPAQEKNFTTAPAICHDGKAHFPREGVFVSNGTHWFVTQRNFYEPQIITTDNTFVSGNCDVVIGIVNNTVYDPLQPELDSFKEELDKYFKNHTSPDVDLGDISGINASVVNIQKEIDRLNEVAKNLNESLIDLQELGKYEQYIKWPWYIWLGFIAGLIAIVMVTIMLCCMTSCCSCLKGCCSCGSCCKFDEDDSEPVLKGVKLHYT

SEQ ID NO: 320 - protein, 1256 aa, synthetic construct
QCVNLITRTQSYTNSFTRGVYYPDKVFRSSVLHSTQDLFLPFFSNVTWFHAIHVSGTNGTKRFDNPALPFNDGVYFASTEKSNIIRGWIFGTTLDSKTQSLLIVNNATNVVIKVCEFQFCNDPFLDVYQKNNKSWMESEFRVYSSANNCTFEYVSQPFLMDLVGKEGNFKNLREFVFKNIDGYFKIYSKHTPINLERDLPQGFSALEPLVDLPIGINITRFQTLLALHRSYLTPVDSSSGWTAGAAAYYVGYLQPRTFLLKYNENGTITDAVDCALDPLSETKCTLKSFTVEKGIYQTSNFRVQPTESIVRFPNITNLCPFHEVFNATTFASVYAWNRKRISNCVADYSVIYNFAPFFAFKCYGVSPTKLNDLCFTNVYADSFVIRGNEVSQIAPGQTGNIADYNYKLPDDFTGCVIAWNSNKLDSTPSGNYNYLYRLLRKSKLKPFERDISTEIYQAGNRPCNGVAGPNCYSPLQSYGFRPTYGVGHQPYRVVVLSFELLHAPATVCGPKKSTNLVKNKCVNFNFNGLTGTGVLTESNKKFLPFQQFGRDIADTTDAVRDPQTLEILDITPCSFGGVSVITPGTNTSNQVAVLYQGVNCTEVPVAIHADQLTPTWRVYSTGSNVFQTRAGCLIGAEYVNNSYECDIPIGAGICASYQTQTKSHQQAQSVASQSIIAYTMSLGAENSVAYSNNSIAIPTNFTISVTTEILPVSMTKTSVDCTMYICGDSTECSNLLLQYGSFCTQLKRALTGIAVEQDKNTQEVFAQVKQIYKTPPIKYFGGFNFSQILPDPSKPSKRSFIEDLLFNKVTLADAGFIKQYGDCLGDIAARDLICAQKFNGLTVLPPLLTDEMIAQYTSALLAGTITSGWTFGAGAALQIPFAMQMAYRFNGIGVTQNVLYENQKLIANQFNSAIGKIQDSLSSTASALGKLQDVVNHNAQALNTLVKQLSSKFGAISSVLNDILSRLDPPEAEVQIDRLITGRLQSLQTYVTQQLIRAAEIRASANLAATKMSECVLGQSKRVDFCGKGYHLMSFPQSAPHGVVFLHVTYVPAQEKNFTTAPAICHDGKAHFPREGVFVSNGTHWFVTQRNFYEPQIITTDNTFVSGNCDVVIGIVNNTVYDPLQPELDSFKEELDKYFKNHTSPDVDLGDISGINASVVNIQKEIDRLNEVAKNLNESLIDLQELGKYEQYIKWPWYIWLGFIAGLIAIVMVTIMLCCMTSCCSCLKGCCSCGSCCKFDEDDSEPVLKGVKLHYT

SEQ ID NO: 321 - protein, 1269 aa, synthetic construct
MFVFLVLLPLVSSQCVNLITRTQSYTNSFTRGVYYPDKVFRSSVLHSTQDLFLPFFSNVTWFHAIHVSGTNGTKRFDNPALPFNDGVYFASTEKSNIIRGWIFGTTLDSKTQSLLIVNNATNVVIKVCEFQFCNDPFLDVYQKNNKSWMESEFRVYSSANNCTFEYVSQPFLMDLVGKEGNFKNLREFVFKNIDGYFKIYSKHTPINLERDLPQGFSALEPLVDLPIGINITRFQTLLALHRSYLTPVDSSSGWTAGAAAYYVGYLQPRTFLLKYNENGTITDAVDCALDPLSETKCTLKSFTVEKGIYQTSNFRVQPTESIVRFPNITNLCPFHEVFNATTFASVYAWNRKRISNCVADYSVIYNFAPFFAFKCYGVSPTKLNDLCFTNVYADSFVIRGNEVSQIAPGQTGNIADYNYKLPDDFTGCVIAWNSNKLDSKPSGNYNYLYRLLRKSKLKPFERDISTEIYQAGNRPCNGVAGSNCYSPLQSYGFRPTYGVGHQPYRVVVLSFELLHAPATVCGPKKSTNLVKNKCVNFNFNGLTGTGVLTESNKKFLPFQQFGRDIADTTDAVRDPQTLEILDITPCSFGGVSVITPGTNTSNQVAVLYQGVNCTEVPVAIHADQLTPTWRVYSTGSNVFQTRAGCLIGAEYVNNSYECDIPIGAGICASYQTQTKSHRRARSVASQSIIAYTMSLGAENSVAYSNNSIAIPTNFTISVTTEILPVSMTKTSVDCTMYICGDSTECSNLLLQYGSFCTQLKRALTGIAVEQDKNTQEVFAQVKQIYKTPPIKYFGGFNFSQILPDPSKPSKRSFIEDLLFNKVTLADAGFIKQYGDCLGDIAARDLICAQKFNGLTVLPPLLTDEMIAQYTSALLAGTITSGWTFGAGAALQIPFAMQMAYRFNGIGVTQNVLYENQKLIANQFNSAIGKIQDSLSSTASALGKLQDVVNHNAQALNTLVKQLSSKFGAISSVLNDILSRLDKVEAEVQIDRLITGRLQSLQTYVTQQLIRAAEIRASANLAATKMSECVLGQSKRVDFCGKGYHLMSFPQSAPHGVVFLHVTYVPAQEKNFTTAPAICHDGKAHFPREGVFVSNGTHWFVTQRNFYEPQIITTDNTFVSGNCDVVIGIVNNTVYDPLQPELDSFKEELDKYFKNHTSPDVDLGDISGINASVVNIQKEIDRLNEVAKNLNESLIDLQELGKYEQYIKWPWYIWLGFIAGLIAIVMVTIMLCCMTSCCSCLKGCCSCGSCCKFDEDDSEPVLKGVKLHYT

SEQ ID NO: 322 - protein, 1256 aa, synthetic construct
QCVNLITRTQSYTNSFTRGVYYPDKVFRSSVLHSTQDLFLPFFSNVTWFHAIHVSGTNGTKRFDNPALPFNDGVYFASTEKSNIIRGWIFGTTLDSKTQSLLIVNNATNVVIKVCEFQFCNDPFLDVYQKNNKSWMESEFRVYSSANNCTFEYVSQPFLMDLVGKEGNFKNLREFVFKNIDGYFKIYSKHTPINLERDLPQGFSALEPLVDLPIGINITRFQTLLALHRSYLTPVDSSSGWTAGAAAYYVGYLQPRTFLLKYNENGTITDAVDCALDPLSETKCTLKSFTVEKGIYQTSNFRVQPTESIVRFPNITNLCPFHEVFNATTFASVYAWNRKRISNCVADYSVIYNFAPFFAFKCYGVSPTKLNDLCFTNVYADSFVIRGNEVSQIAPGQTGNIADYNYKLPDDFTGCVIAWNSNKLDSKPSGNYNYLYRLLRKSKLKPFERDISTEIYQAGNRPCNGVAGSNCYSPLQSYGFRPTYGVGHQPYRVVVLSFELLHAPATVCGPKKSTNLVKNKCVNFNFNGLTGTGVLTESNKKFLPFQQFGRDIADTTDAVRDPQTLEILDITPCSFGGVSVITPGTNTSNQVAVLYQGVNCTEVPVAIHADQLTPTWRVYSTGSNVFQTRAGCLIGAEYVNNSYECDIPIGAGICASYQTQTKSHRRARSVASQSIIAYTMSLGAENSVAYSNNSIAIPTNFTISVTTEILPVSMTKTSVDCTMYICGDSTECSNLLLQYGSFCTQLKRALTGIAVEQDKNTQEVFAQVKQIYKTPPIKYFGGFNFSQILPDPSKPSKRSFIEDLLFNKVTLADAGFIKQYGDCLGDIAARDLICAQKFNGLTVLPPLLTDEMIAQYTSALLAGTITSGWTFGAGAALQIPFAMQMAYRFNGIGVTQNVLYENQKLIANQFNSAIGKIQDSLSSTASALGKLQDVVNHNAQALNTLVKQLSSKFGAISSVLNDILSRLDKVEAEVQIDRLITGRLQSLQTYVTQQLIRAAEIRASANLAATKMSECVLGQSKRVDFCGKGYHLMSFPQSAPHGVVFLHVTYVPAQEKNFTTAPAICHDGKAHFPREGVFVSNGTHWFVTQRNFYEPQIITTDNTFVSGNCDVVIGIVNNTVYDPLQPELDSFKEELDKYFKNHTSPDVDLGDISGINASVVNIQKEIDRLNEVAKNLNESLIDLQELGKYEQYIKWPWYIWLGFIAGLIAIVMVTIMLCCMTSCCSCLKGCCSCGSCCKFDEDDSEPVLKGVKLHYT

SEQ ID NO: 323 - protein, 1269 aa, synthetic construct
MFVFLVLLPLVSSQCVNLITRTQSYTNSFTRGVYYPDKVFRSSVLHSTQDLFLPFFSNVTWFHAIHVSGTNGTKRFDNPALPFNDGVYFASTEKSNIIRGWIFGTTLDSKTQSLLIVNNATNVVIKVCEFQFCNDPFLDVYQKNNKSWMESEFRVYSSANNCTFEYVSQPFLMDLVGKEGNFKNLREFVFKNIDGYFKIYSKHTPINLERDLPQGFSALEPLVDLPIGINITRFQTLLALHRSYLTPVDSSSGWTAGAAAYYVGYLQPRTFLLKYNENGTITDAVDCALDPLSETKCTLKSFTVEKGIYQTSNFRVQPTESIVRFPNITNLCPFHEVFNATTFASVYAWNRKRISNCVADYSVIYNFAPFFAFKCYGVSPTKLNDLCFTNVYADSFVIRGNEVSQIAPGQTGNIADYNYKLPDDFTGCVIAWNSNKLDSKPSGNYNYLYRLLRKSKLKPFERDISTEIYQAGNRPCNGVAGSNCYSPLQSYGFRPTYGVGHQPYRVVVLSFELLHAPATVCGPKKSTNLVKNKCVNFNFNGLTGTGVLTESNKKFLPFQQFGRDIADTTDAVRDPQTLEILDITPCSFGGVSVITPGTNTSNQVAVLYQGVNCTEVPVAIHADQLTPTWRVYSTGSNVFQTRAGCLIGAEYVNNSYECDIPIGAGICASYQTQTKSHQQAQSVASQSIIAYTMSLGAENSVAYSNNSIAIPTNFTISVTTEILPVSMTKTSVDCTMYICGDSTECSNLLLQYGSFCTQLKRALTGIAVEQDKNTQEVFAQVKQIYKTPPIKYFGGFNFSQILPDPSKPSKRSFIEDLLFNKVTLADAGFIKQYGDCLGDIAARDLICAQKFNGLTVLPPLLTDEMIAQYTSALLAGTITSGWTFGAGAALQIPFAMQMAYRFNGIGVTQNVLYENQKLIANQFNSAIGKIQDSLSSTASALGKLQDVVNHNAQALNTLVKQLSSKFGAISSVLNDILSRLDPPEAEVQIDRLITGRLQSLQTYVTQQLIRAAEIRASANLAATKMSECVLGQSKRVDFCGKGYHLMSFPQSAPHGVVFLHVTYVPAQEKNFTTAPAICHDGKAHFPREGVFVSNGTHWFVTQRNFYEPQIITTDNTFVSGNCDVVIGIVNNTVYDPLQPELDSFKEELDKYFKNHTSPDVDLGDISGINASVVNIQKEIDRLNEVAKNLNESLIDLQELGKYEQYIKWPWYIWLGFIAGLIAIVMVTIMLCCMTSCCSCLKGCCSCGSCCKFDEDDSEPVLKGVKLHYT

SEQ ID NO: 324 - protein, 1256 aa, synthetic construct
QCVNLITRTQSYTNSFTRGVYYPDKVFRSSVLHSTQDLFLPFFSNVTWFHAIHVSGTNGTKRFDNPALPFNDGVYFASTEKSNIIRGWIFGTTLDSKTQSLLIVNNATNVVIKVCEFQFCNDPFLDVYQKNNKSWMESEFRVYSSANNCTFEYVSQPFLMDLVGKEGNFKNLREFVFKNIDGYFKIYSKHTPINLERDLPQGFSALEPLVDLPIGINITRFQTLLALHRSYLTPVDSSSGWTAGAAAYYVGYLQPRTFLLKYNENGTITDAVDCALDPLSETKCTLKSFTVEKGIYQTSNFRVQPTESIVRFPNITNLCPFHEVFNATTFASVYAWNRKRISNCVADYSVIYNFAPFFAFKCYGVSPTKLNDLCFTNVYADSFVIRGNEVSQIAPGQTGNIADYNYKLPDDFTGCVIAWNSNKLDSKPSGNYNYLYRLLRKSKLKPFERDISTEIYQAGNRPCNGVAGSNCYSPLQSYGFRPTYGVGHQPYRVVVLSFELLHAPATVCGPKKSTNLVKNKCVNFNFNGLTGTGVLTESNKKFLPFQQFGRDIADTTDAVRDPQTLEILDITPCSFGGVSVITPGTNTSNQVAVLYQGVNCTEVPVAIHADQLTPTWRVYSTGSNVFQTRAGCLIGAEYVNNSYECDIPIGAGICASYQTQTKSHQQAQSVASQSIIAYTMSLGAENSVAYSNNSIAIPTNFTISVTTEILPVSMTKTSVDCTMYICGDSTECSNLLLQYGSFCTQLKRALTGIAVEQDKNTQEVFAQVKQIYKTPPIKYFGGFNFSQILPDPSKPSKRSFIEDLLFNKVTLADAGFIKQYGDCLGDIAARDLICAQKFNGLTVLPPLLTDEMIAQYTSALLAGTITSGWTFGAGAALQIPFAMQMAYRFNGIGVTQNVLYENQKLIANQFNSAIGKIQDSLSSTASALGKLQDVVNHNAQALNTLVKQLSSKFGAISSVLNDILSRLDPPEAEVQIDRLITGRLQSLQTYVTQQLIRAAEIRASANLAATKMSECVLGQSKRVDFCGKGYHLMSFPQSAPHGVVFLHVTYVPAQEKNFTTAPAICHDGKAHFPREGVFVSNGTHWFVTQRNFYEPQIITTDNTFVSGNCDVVIGIVNNTVYDPLQPELDSFKEELDKYFKNHTSPDVDLGDISGINASVVNIQKEIDRLNEVAKNLNESLIDLQELGKYEQYIKWPWYIWLGFIAGLIAIVMVTIMLCCMTSCCSCLKGCCSCGSCCKFDEDDSEPVLKGVKLHYT

SEQ ID NO: 325 - protein, 1269 aa, synthetic construct
MFVFLVLLPLVSSQCVNLITRTQSYTNSFTRGVYYPDKVFRSSVLHSTQDLFLPFFSNVTWFHAIHVSGTNGTKRFDNPALPFNDGVYFASTEKSNIIRGWIFGTTLDSKTQSLLIVNNATNVVIKVCEFQFCNDPFLDVYQKNNKSWMESEFRVYSSANNCTFEYVSQPFLMDLVGKEGNFKNLREFVFKNIDGYFKIYSKHTPINLERDLPQGFSALEPLVDLPIGINITRFQTLLALHRSYLTPVDSSSGWTAGAAAYYVGYLQPRTFLLKYNENGTITDAVDCALDPLSETKCTLKSFTVEKGIYQTSNFRVQPTESIVRFPNITNLCPFHEVFNATTFASVYAWNRKRISNCVADYSVIYNFAPFFAFKCYGVSPTKLNDLCFTNVYADSFVIRGNEVSQIAPGQTGNIADYNYKLPDDFTGCVIAWNSNKLDSKPSGNYNYLYRLLRKSKLKPFERDISTEIYQAGNKPCNGVAGPNCYSPLQSYGFRPTYGVGHQPYRVVVLSFELLHAPATVCGPKKSTNLVKNKCVNFNFNGLTGTGVLTESNKKFLPFQQFGRDIADTTDAVRDPQTLEILDITPCSFGGVSVITPGTNTSNQVAVLYQGVNCTEVPVAIHADQLTPTWRVYSTGSNVFQTRAGCLIGAEYVNNSYECDIPIGAGICASYQTQTKSHRRARSVASQSIIAYTMSLGAENSVAYSNNSIAIPTNFTISVTTEILPVSMTKTSVDCTMYICGDSTECSNLLLQYGSFCTQLKRALTGIAVEQDKNTQEVFAQVKQIYKTPPIKYFGGFNFSQILPDPSKPSKRSFIEDLLFNKVTLADAGFIKQYGDCLGDIAARDLICAQKFNGLTVLPPLLTDEMIAQYTSALLAGTITSGWTFGAGAALQIPFAMQMAYRFNGIGVTQNVLYENQKLIANQFNSAIGKIQDSLSSTASALGKLQDVVNHNAQALNTLVKQLSSKFGAISSVLNDILSRLDKVEAEVQIDRLITGRLQSLQTYVTQQLIRAAEIRASANLAATKMSECVLGQSKRVDFCGKGYHLMSFPQSAPHGVVFLHVTYVPAQEKNFTTAPAICHDGKAHFPREGVFVSNGTHWFVTQRNFYEPQIITTDNTFVSGNCDVVIGIVNNTVYDPLQPELDSFKEELDKYFKNHTSPDVDLGDISGINASVVNIQKEIDRLNEVAKNLNESLIDLQELGKYEQYIKWPWYIWLGFIAGLIAIVMVTIMLCCMTSCCSCLKGCCSCGSCCKFDEDDSEPVLKGVKLHYT

SEQ ID NO: 326 - protein, 1256 aa, synthetic construct
QCVNLITRTQSYTNSFTRGVYYPDKVFRSSVLHSTQDLFLPFFSNVTWFHAIHVSGTNGTKRFDNPALPFNDGVYFASTEKSNIIRGWIFGTTLDSKTQSLLIVNNATNVVIKVCEFQFCNDPFLDVYQKNNKSWMESEFRVYSSANNCTFEYVSQPFLMDLVGKEGNFKNLREFVFKNIDGYFKIYSKHTPINLERDLPQGFSALEPLVDLPIGINITRFQTLLALHRSYLTPVDSSSGWTAGAAAYYVGYLQPRTFLLKYNENGTITDAVDCALDPLSETKCTLKSFTVEKGIYQTSNFRVQPTESIVRFPNITNLCPFHEVFNATTFASVYAWNRKRISNCVADYSVIYNFAPFFAFKCYGVSPTKLNDLCFTNVYADSFVIRGNEVSQIAPGQTGNIADYNYKLPDDFTGCVIAWNSNKLDSKPSGNYNYLYRLLRKSKLKPFERDISTEIYQAGNKPCNGVAGPNCYSPLQSYGFRPTYGVGHQPYRVVVLSFELLHAPATVCGPKKSTNLVKNKCVNFNFNGLTGTGVLTESNKKFLPFQQFGRDIADTTDAVRDPQTLEILDITPCSFGGVSVITPGTNTSNQVAVLYQGVNCTEVPVAIHADQLTPTWRVYSTGSNVFQTRAGCLIGAEYVNNSYECDIPIGAGICASYQTQTKSHRRARSVASQSIIAYTMSLGAENSVAYSNNSIAIPTNFTISVTTEILPVSMTKTSVDCTMYICGDSTECSNLLLQYGSFCTQLKRALTGIAVEQDKNTQEVFAQVKQIYKTPPIKYFGGFNFSQILPDPSKPSKRSFIEDLLFNKVTLADAGFIKQYGDCLGDIAARDLICAQKFNGLTVLPPLLTDEMIAQYTSALLAGTITSGWTFGAGAALQIPFAMQMAYRFNGIGVTQNVLYENQKLIANQFNSAIGKIQDSLSSTASALGKLQDVVNHNAQALNTLVKQLSSKFGAISSVLNDILSRLDKVEAEVQIDRLITGRLQSLQTYVTQQLIRAAEIRASANLAATKMSECVLGQSKRVDFCGKGYHLMSFPQSAPHGVVFLHVTYVPAQEKNFTTAPAICHDGKAHFPREGVFVSNGTHWFVTQRNFYEPQIITTDNTFVSGNCDVVIGIVNNTVYDPLQPELDSFKEELDKYFKNHTSPDVDLGDISGINASVVNIQKEIDRLNEVAKNLNESLIDLQELGKYEQYIKWPWYIWLGFIAGLIAIVMVTIMLCCMTSCCSCLKGCCSCGSCCKFDEDDSEPVLKGVKLHYT

SEQ ID NO: 327 - protein, 1269 aa, synthetic construct
MFVFLVLLPLVSSQCVNLITRTQSYTNSFTRGVYYPDKVFRSSVLHSTQDLFLPFFSNVTWFHAIHVSGTNGTKRFDNPALPFNDGVYFASTEKSNIIRGWIFGTTLDSKTQSLLIVNNATNVVIKVCEFQFCNDPFLDVYQKNNKSWMESEFRVYSSANNCTFEYVSQPFLMDLVGKEGNFKNLREFVFKNIDGYFKIYSKHTPINLERDLPQGFSALEPLVDLPIGINITRFQTLLALHRSYLTPVDSSSGWTAGAAAYYVGYLQPRTFLLKYNENGTITDAVDCALDPLSETKCTLKSFTVEKGIYQTSNFRVQPTESIVRFPNITNLCPFHEVFNATTFASVYAWNRKRISNCVADYSVIYNFAPFFAFKCYGVSPTKLNDLCFTNVYADSFVIRGNEVSQIAPGQTGNIADYNYKLPDDFTGCVIAWNSNKLDSKPSGNYNYLYRLLRKSKLKPFERDISTEIYQAGNKPCNGVAGPNCYSPLQSYGFRPTYGVGHQPYRVVVLSFELLHAPATVCGPKKSTNLVKNKCVNFNFNGLTGTGVLTESNKKFLPFQQFGRDIADTTDAVRDPQTLEILDITPCSFGGVSVITPGTNTSNQVAVLYQGVNCTEVPVAIHADQLTPTWRVYSTGSNVFQTRAGCLIGAEYVNNSYECDIPIGAGICASYQTQTKSHQQAQSVASQSIIAYTMSLGAENSVAYSNNSIAIPTNFTISVTTEILPVSMTKTSVDCTMYICGDSTECSNLLLQYGSFCTQLKRALTGIAVEQDKNTQEVFAQVKQIYKTPPIKYFGGFNFSQILPDPSKPSKRSFIEDLLFNKVTLADAGFIKQYGDCLGDIAARDLICAQKFNGLTVLPPLLTDEMIAQYTSALLAGTITSGWTFGAGAALQIPFAMQMAYRFNGIGVTQNVLYENQKLIANQFNSAIGKIQDSLSSTASALGKLQDVVNHNAQALNTLVKQLSSKFGAISSVLNDILSRLDPPEAEVQIDRLITGRLQSLQTYVTQQLIRAAEIRASANLAATKMSECVLGQSKRVDFCGKGYHLMSFPQSAPHGVVFLHVTYVPAQEKNFTTAPAICHDGKAHFPREGVFVSNGTHWFVTQRNFYEPQIITTDNTFVSGNCDVVIGIVNNTVYDPLQPELDSFKEELDKYFKNHTSPDVDLGDISGINASVVNIQKEIDRLNEVAKNLNESLIDLQELGKYEQYIKWPWYIWLGFIAGLIAIVMVTIMLCCMTSCCSCLKGCCSCGSCCKFDEDDSEPVLKGVKLHYT

SEQ ID NO: 328 - protein, 1256 aa, synthetic construct
QCVNLITRTQSYTNSFTRGVYYPDKVFRSSVLHSTQDLFLPFFSNVTWFHAIHVSGTNGTKRFDNPALPFNDGVYFASTEKSNIIRGWIFGTTLDSKTQSLLIVNNATNVVIKVCEFQFCNDPFLDVYQKNNKSWMESEFRVYSSANNCTFEYVSQPFLMDLVGKEGNFKNLREFVFKNIDGYFKIYSKHTPINLERDLPQGFSALEPLVDLPIGINITRFQTLLALHRSYLTPVDSSSGWTAGAAAYYVGYLQPRTFLLKYNENGTITDAVDCALDPLSETKCTLKSFTVEKGIYQTSNFRVQPTESIVRFPNITNLCPFHEVFNATTFASVYAWNRKRISNCVADYSVIYNFAPFFAFKCYGVSPTKLNDLCFTNVYADSFVIRGNEVSQIAPGQTGNIADYNYKLPDDFTGCVIAWNSNKLDSKPSGNYNYLYRLLRKSKLKPFERDISTEIYQAGNKPCNGVAGPNCYSPLQSYGFRPTYGVGHQPYRVVVLSFELLHAPATVCGPKKSTNLVKNKCVNFNFNGLTGTGVLTESNKKFLPFQQFGRDIADTTDAVRDPQTLEILDITPCSFGGVSVITPGTNTSNQVAVLYQGVNCTEVPVAIHADQLTPTWRVYSTGSNVFQTRAGCLIGAEYVNNSYECDIPIGAGICASYQTQTKSHQQAQSVASQSIIAYTMSLGAENSVAYSNNSIAIPTNFTISVTTEILPVSMTKTSVDCTMYICGDSTECSNLLLQYGSFCTQLKRALTGIAVEQDKNTQEVFAQVKQIYKTPPIKYFGGFNFSQILPDPSKPSKRSFIEDLLFNKVTLADAGFIKQYGDCLGDIAARDLICAQKFNGLTVLPPLLTDEMIAQYTSALLAGTITSGWTFGAGAALQIPFAMQMAYRFNGIGVTQNVLYENQKLIANQFNSAIGKIQDSLSSTASALGKLQDVVNHNAQALNTLVKQLSSKFGAISSVLNDILSRLDPPEAEVQIDRLITGRLQSLQTYVTQQLIRAAEIRASANLAATKMSECVLGQSKRVDFCGKGYHLMSFPQSAPHGVVFLHVTYVPAQEKNFTTAPAICHDGKAHFPREGVFVSNGTHWFVTQRNFYEPQIITTDNTFVSGNCDVVIGIVNNTVYDPLQPELDSFKEELDKYFKNHTSPDVDLGDISGINASVVNIQKEIDRLNEVAKNLNESLIDLQELGKYEQYIKWPWYIWLGFIAGLIAIVMVTIMLCCMTSCCSCLKGCCSCGSCCKFDEDDSEPVLKGVKLHYT

SEQ ID NO: 329 - protein, 1269 aa, synthetic construct
MFVFLVLLPLVSSQCVMPLFNLITTTQSYTNSFTRGVYYPDKVFRSSVLHLTQDLFLPFFSNVTWFHAISGTNGTKRFDNPVLPFNDGVYFASTEKSNIIRGWIFGTTLDSKTQSLLIVNNATNVFIKVCEFQFCNDPFLDVYHKNNKSWMESESGVYSSANNCTFEYVSQPFLMDLEGKQGNFKNLREFVFKNIDGYFKIYSKHTPIIGRDFPQGFSALEPLVDLPIGINITRFQTLLALNRSYLTPGDSSSGWTAGAADYYVGYLQPRTFLLKYNENGTITDAVDCALDPLSETKCTLKSFTVEKGIYQTSNFRVQPTESIVRFPNVTNLCPFHEVFNATRFASVYAWNRTRISNCVADYSVLYNFAPFFAFKCYGVSPTKLNDLCFTNVYADSFVIKGNEVSQIAPGQTGNIADYNYKLPDDFTGCVIAWNSNKLDSKHSGNYDYWYRSFRKSKLKPFERDISTEIYQAGNKPCKGKGPNCYFPLQSYGFRPTYGVGHQPYRVVVLSFELLHAPATVCGPKKSTNLVKNKCVNFNFNGLTGTGVLTKSNKKFLPFQQFGRDIVDTTDAVRDPQTLEILDITPCSFGGVSVITPGTNTSNQVAVLYQGVNCTEVSVAIHADQLTPTWRVYSTGSNVFQTRAGCLIGAEYVNNSYECDIPIGAGVCASYQTQTKSRQQAQSVASQSIIAYTMSLGAENSVAYSNNSIAIPTNFTISVTTEILPVSMTKTSVDCTMYICGDSTECSNLLLQYGSFCTQLKRALTGIAVEQDKNTQEVFAQVKQIYKTPPIKYFGGFNFSQILPDPSKPSKRSFIEDLLFNKVTLADAGFIKQYGDCLGDIAARDLICAQKFNGLTVLPPLLTDEMIAQYTSALLAGTITSGWTFGAGAALQIPFAMQMAYRFNGIGVTQNVLYENQKLIANQFNSAIGKIQDSLFSTASALGKLQDVVNHNAQALNTLVKQLSSKFGAISSVLNDILSRLDPPEAEVQIDRLITGRLQSLQTYVTQQLIRAAEIRASANLAATKMSECVLGQSKRVDFCGKGYHLMSFPQSAPHGVVFLHVTYVPAQEKNFTTAPAICHDGKAHFPREGVFVSNGTHWFVTQRNFYEPQIITTDNTFVSGNCDVVIGIVNNTVYDPLQLELDSFKEELDKYFKNHTSPDVDLGDISGINASVVNIQKEIDRLNEVAKNLNESLIDLQELGKYEQYIKWPWYIWLGFIAGLIAIVMVTIMLCCMTSCCSCLKGCCSCGSCCKFDEDDSEPVLKGVKLHYT

SEQ ID NO: 330 - protein, 1269 aa, synthetic construct; identical to SEQ ID NO: 295

SEQ ID NO: 331 - protein, 1268 aa, synthetic construct; identical to SEQ ID NO: 213

SEQ ID NO: 332 - protein, 1269 aa, synthetic construct; identical to SEQ ID NO: 311

SEQ ID NO: 333 - protein, 1268 aa, synthetic construct; identical to SEQ ID NO: 211
